United States Patent Application Publication US 2026/0265781 A1 - sequence listing, part 10

SEQ ID NO: 22 - DNA, 26290500 bp, synthetic construct (residues 19,717,876-21,908,750 of 26,290,500)
  source 1..26290500: mol_type = other DNA; note = Hot spot 1 - Chr 3 contig ref|NW_020822499.1 from Cricetulus griseus
tctaacctccttcagaagtgacttgctcctattctgagcagaagctttcagaattattctcagtcatcaggatgtgccccagtggttgaatgcttgctggcatctagcagtcaaacccaaggccctgggtctgatcccaggtggctgctgctcttttagcctgctctcagaacacagaaggtgtgtgatgcctgagaggaccttgggtaagagatgaccagaacagaagcgcatctttgtgttgaaaaacatgagacaccttggttctgttgccccagcacaacccagttcaacctatacagaacaagtactttgcaagtccaaaatgtctgctgatcatgctcaaacgaaagcagacagaagccactctggggcctcactgttgagagaaacagaattctgtgtgaagggaaaaggaacagaaaggctcaaaaagcctgcaggaaatgcagtgtgaacaaagaacaaagaagcacggtgactaggtaaaagccatccagagaaggaagggcatgaattataaaggaaccccttaagcaacagcaggacctaagggaacatgcatccccaacagaaggaagggtgggacagggaaactgagagcaaacagccatgcagaagacaaaagcactgtccaagagaagtcaagtatagacagagaccaaacagtagggagagagacagtaaacagtttgaagacaaaactaagtttcactcagacactaccaaaagcaagaccatgagagcagcttgaacagcattgcactcctgaaacagttaagaatccagctaagggccttgcatttccaaggaggatgccattcccttcttgaagccttgtctccacactctccagaaagcccactgctatgtttatggtcctctcctgctgccagcccctgtgaagcctcgaatccttgtgttttgtaccagcaaaaataagggacatgagctaattttaattcatatgagaatgaaattagtgcagggcttgccttgttggtaaacagaaccaaaggctaactgtgtgtcaggatagcacagtagttatcctcccaagccaattatgctcttactggaaaccgggtagttgcagattatccctttggcttcatttcacattctagtagatccagagagcctcaggctcctcggaggtagtgtgactgcagcaaggccaacatcttacatccactgctccatttcccctttgtagggagacaccctagccccgcccaatagtcctgggacaggtaccaggtggacccgggactcttgggcggggctagggtgtctccctccctacaccccttggctgctgtctccttgctgtgcagacttccagctttaattactcttgaaaggggatgtgagtggtggctcctgcttcctggccaatcagtgatccggaaccccactactcacagcatgacctggggctgggcagcatcagtgtctccggagagcatgttagaatcacaggtacccaggcccacaatctgtaatcacttagtttgtgccctcacgatcccctaggctcctacatattgggacattttgatggtgcttccaacacaccactcttcccagaaaaagagcgttatgtccctgtgttgcgttgaacagaaacattcattggtcctgtgcagagagaatgctatattaacatcttttagcctcagtttccccctctatggagggggactaatcatgcctgtctcagaattgtggtcacactcaagtgcttgccagagcaggatgagtgacgagactgggagaaggacattttagagacactctggcccaaagcagacaaccaacaaaagattctggccacacaagacatgaacttaatttgattgatcctgtctggcccccaatgctttatactttgtactttaaaaaaaagccaacatctatttagaaaggagttggagagctgggaattttgacatactgcacacaccaattcacttccacagccatctggcccgcagcatgtcaacatttctgtgtgatttagcacctacacaacagagtctctcggagtctggtttctcctctcagcccagcgcttagaagaaagtaccatctcaagtaagtttccttggaacatgtgaaaccatctcaacatggcatctggaattacagagtgtgccccaacctaaattaggatttggggggtttaaaaacaacaataagcctgaaattttcacccatacaaaatatcaagcctggattaatcctgaacctgacttctctaaaattttcttcaatagtagctcatgtttcctgtcttcaccagagtaggctaaccaagtcttaagaaagatggggtgtgtgcagctgagaagatgtgtttggcatgtctaagaccctgagttaaagcctcttaggaggaaagaggagaggcagagagagagacagagagacagggacagagagaaaggcaacccaggaactctattcatgggcctggatgcctggtacatcttcatctttacacacattctgacattctgcaactatgccctagattgcttcctatggctagttctacaggccagtttgatgggagcactttctcacttgaggttccttattttcagacaaccccagcttgtgtcaaacagacacccccccccaaaaaaaagaaagaaaccactaaccagcacaagctgtaacacatgatgtatttttaaaaatttgtttatgtttttcaaggcaggatttctctgtgtagccctggctgtcctggaactcggggattcatctgcctcagactcctgagcactgggatcacaggtgtatatataataccaccacccagcacaagtgtatttcctagaacaaattctgcaagataaactaatatcaaattacattaaactaaaactaccccattttattaataaagaaattgttgggaaggagagttagaatagagaaaaatagagagtgagctagagacaagggagatttgacatgatcacaccttctctgcagcaggggaggagcttgtattacaggcaattaaactcctttcccacatcgaactctcagcttgatcaacgggactgacattcatgttgtcccatgacaggtatatcagatgatcccacgagttctccagagactctgtctctcaggcgtcccttcccattctaggtgacatttggtctccagagcctgtggtgctcagcatgtttctaccaatgacacattcattaatcttacactttgctactgtacatcagagtccatcacacaaacctccaaagctcagtgggtttgttcctacgtgagaacttccctgtcacctaatctcctcctggagactccatcattccactccatcattcttctaaaaaaaagataataataatagatttagatttctttattttatgtgtctaaacattttgctggcaagtatgtatgtgaaccatgtttgtgctgggtaccttctgtctgtggaggtcaaaagggggcactggatcccctggcaccggagttatatttggttgtgaaccactatatagatagaaactgaacctggtcgtctgcaagagcaataagcgctcttaaccactgagccatctctccagccttctgccccatcattctcctttatgcagaagaatccaaactaccaaactctctatagggccttcaaaccatcttttgaaaggatggaccaactttctagcctcacagatgctgggaaagcagaaaagacatccttcacccagctctcccacttagctaacagaccatgtgcccttgaccaaggctgttcttcttctctctgatctcagtctcatatttgatacaaatattaagagcaattgagaagtgcaattctgtgttctgaattactaacagcagctatccttcaatgtttaagggaattgatttcaggaccctgaggctaacgaataccatagatgctcaagtcccttataaaaagagggaagaactctaaggccctatccctcctatgggacctttgacatttaggagtgactagggaaagggatatcactttcttcggtgatgtaaccaatgaaaatttttcccaggtcccaataaataacacccttcccatgcaatcctatttagattcagtgggtcaaataaacacacacaagacatggaagcaggcgtaagaactgttgggaaggaggagtgggaggagtgagaataaggcatggtcatagggggtgaaaaggatggaaatttagtacataaatgtatgtcagcaatagaaaatacataaataataaaaagcatctcaattttagaactattggaatgtagagagatatgtatctctgaattaattgtatgcacgttaaaaagtaaagaacttccacagtgaaagagcagtgaaatctatccactaaacgtatcaggcttgagaggaaggttctcagcagttccacggagcaagaagttgcaaggagctgaggcaatgagggagtgctgctcacgagttgacctaggcctgcaaggcattttctgttagttctggtagttctggctttttacatgcaaggaaagcacaaatccaaagctatgctctatgcttttcctccttataaaaagatgataattctgaatatgtgtaataatacaggaaaatatttagcaaataatgctaaatgaaaacaaaaaatgaaggtgccaaaataaaggaacattttatttaatcttgacacagaatactgccaaatccatctctcaaaatattacccacaatcacactctaatgactgggctaagtttatttttttatttttagcttttaatttttctccatgtatttttaaaaaaatcctgggaattttaactttcctcttttctggatctgctttcatggttgttattttattaagaaataagactgcaatataatccaagggtgttttctacggatgctgaaattgtgaccagtgtaaacatctgtagcacaaatcataaacacaagatggaccagtgggttactcacaactgggtccacacagccctctgtcagtggctaccaggccagggaataagcagggaatccatttggctgagagtccagcaaagacgaggtccatcaaaatagtctatacaaatgccagcataggaagtccttctttacagaaatagggttttacagtgatgcatgtttggtcagagacatgtctttttttaatgagataattccataaaaataagaggtacatttccctcatcaggcttaaacagacctaatagtttggaaggataataaatttttcagaatgttttaaaagccagtgctgagatggtattttgatctgcatctaccacagaagtttatgttctggacttttctgaagattaaatccaagagtaatgacatttcaggccaccaggggtatcaaccaagagggccgcatcatcagttatagaaccacagcaatgtctttgctttgtgcgtggttttatttctttctgcatgagagagagggagaggtgtgtacatgcatgtgttcagatatgaatatactgcacatgtgtagaggccagaggaggagattgggtaccctgctctttcactctctaccttattcccttgaaacagggtctctcaatcaaactgcagctaggctggcagacaacagatcccagagatcctcccatagtacagggttacaatcaggcatatgactacccctggctttttacatgcatgctggtgttcactgaataacttgttcctttgcctctgaagagaggagctcagggcgactgtcttgctgggagcagccagacatgtgttccatcctcttggacgtacccatgggctacaagcaactgaactgaattgaccatctgccatttttgtgtcctcagagccaggtactggtctggccagatgaccagttctatgagaacatgcctgaagaaggtgtaggagtatgcagtttggaagggcttcggtttctgccctttgtggaaaaggaagcccaacaggaacacttctctatgtgtaaaagtcattcattaatttatgagatcatatttttatatgaaaaagggtctgggccttcttaaatgaatgggcttcctttaaaaggagggaagtgggtccttctaaatcttgatttttcaactaaggaaagaaaatgatcctaaatgggactccttcataaaaccctttcaaatactagtgctactttgggtgatggtagctgtagctgtctcttgttggcctttactaaacccaggtatttctctgagcaatcttggggtgtcatctcataaataaagaatagaacttgtaggtttctcctgtgaaaattttaacagtgggtgtgatggttagtttgaattttcaacatgacagaatggaaaattagccaagaaaagagcctccgtaaggaaactgtctaggtcaggttggcctgtcccaaagcatatgtgtgattatcttgattatactaatagaagtggaaaggctcacccactggaggggcaccatttcctgggcaagggaacttgaagtttataagagcagagaactggagctgagcactggcatgcatgaatgcatgaattcatctctctctgctcctgactgaatgtcatgtgaccgagtgcagcaagtccctgccaccttgacttctgcacagcgatgggtggactctaacctggaattgcaagccaaataagctctttctcccttaagttgctctcgtcagccagtatattttatcacagcagcaggaaatgaaaccctgagacagtgacactgcattttcaataatcagtttcagctgcctgaaggaagctgcctaggccaaattccccatttggggcagatttggggctggcaaaggctgccagagaattgagcttagatagaggaaacattgcccttgaggttcatcctgctctgtgttgtcggattttcttctaagctgcacccctgcacacatttactttcccctgggtctttttgtccctctctttttactcttcctttccgattccttctttggttttttctcatctttgcctcactctacattctgagcacagtcattagccctctgcgcactgcctcactaccatgctagaaagtgatggcaggatgggcacaagacagcaagcagcatcccagatccccttcacagctgtgcccactgaagttcacaccacctaacaaccagtcagagtaactccaaagtaaccccagctaccagctccaccaggcaagccataaccacaagggaatctgcctaaccaagcaatgtgctgctcatgaccttggcacttaaatattgctttccactcagacttctcacaatacattttttattgttaaaacttcaccaaatgcctacatgctgtgttaattatgctgtgatttgtttactaaagaagctgactggccaatagctggacaggataaggttaggcagaagaaccagatgaaggacattgggaaggagaagggcagagtcagaggagtcatcagtgagacatggagaggaaacaggaggtataagatgaaagagaggtaacatcatgaggcagaatgtagattgatataaacgggtttattcaagttgtaagagttagctagtaacaagcctgagctaccagctaagtatttctaattcattttaagtctcaatgttggttatttgggaactggtgggctggaaagagatgtccatctataccatactacttctagttatactgaaaaccagtcacatactaccctccaaatagttcaccagttagttcttttcctttgggcgcacagtgaagatcaacagcttattcaacaatctggtgccatgtttttctcataacgaattctcagtagcattatttgattgctcagttttccaaggctttttaatggaaaacagacagcacagagacataaacctccctatttcaaggccaatatggggtttaataaaacaaggcctcttagagctaagacagatactcaacaaattctggttgaaataaagagacctaagaattgtccccaattctgtcacagtgaacaggttgtctggctctcttgccctctagtggcccttgtcaccattctggtaccatggacggagtccatagtctcatttagacacacatgtccgcgtgctgcagggttagaatggggattctcttcttcttctcactttccagacaggaaaaccaagattcaggaaggcaaagtaccaagattgtgtggctattaactggcaatggccaagtcaggatctgccatcaggcatctggctgcagtacccacacatagccacaatgctgcacaacatttagggccaagaaaggcatgtggaacagaagaccatctgaggttcttccagatccagaactcatgatccaggaaaatctaagttcttatttacagcaagtggcttcccccatggctgcctcacacaagttcaaggtatcagatgcataaatgtgtggccatcgctactcttacggaggtcagtagccaccaaggataagagcacaaactttcgattacatcttcatctacttcagctactggtttggagggttctgcaaggtattctctcttactaaaaaatctagttctcaaaagagaatgaatgaaccctagctagacataatttgttgttaaaatacattcaaatcagacatgttgttgtaaagtatatttacatattcttgccaaaaatcaaaaggataaaccaaatcataataaagataactctcatttttaaaagaataacaaaaaacctaagaaaattttatttctaaaatagtaagcttagaaattaaacattaatattcttggctccaaaacatgaattatcaaatacataaaatatgcagattttgcatatgaatataaagatgtacagacatttcattataaggtcatcagcacagctgggaaattcaggtcacatcctgagagttacatgaagtagaggaccaatgttatgccctgcaacagtcccactggctaaacaagaattttggttcagaactttgctgagttttttctatgtatgaggtgtgctgtgctaagtctggacccccgcctgccccaccaaaaaagcaatcttgtaccactatccttactctaggggatgctgaaagttttcccagccaatctttctcatggtgctagtaatagcacagatgtagagaacaggctggatcagcttggcacagtggctgggattggggtcatccaacttttactctttaggccacactaaggaagtgtggatgtaatgatttgttgttcattcgcctaccaggtgtggttgtacagaagtttgccttattttcccctctgccttcctcttcccatgctttggttctgtcaatatttacatatcccaagcacccagggattgtacttcttagcgttgtatggacattttgtattactgcatgcaaagcactgcattgcactccttgaccttaaagttcctcaccttcttgccaacaaacatggcatcctgcagactgttcccagttctgctccagatttacacctgcaaggatgtaactttggccatccagctattcatttattgggccactacattctgacatgccttgaccaggactcttgatttatggcttctttcattctaaaatcatatacaagcatcaagcaccatgccaggttccagagttataataataagcaaaatcatatgaaggccccactccctactcttagcacactggcattaatcaaacatgcccaatataatgagaaactgacataggagacctaaaagcattttttaaaaatctggtttatagtcaaggagtgagaggggtagtcagggggatttcctttcttcacctcatttgaagaaataaatggcagagctgttatttaagccaaagcaaaggagaagaagccagaagagagtatcagcaatggcttgctaagaatgccatcgattctcctaagagcaatggaaggtagccacaaagttttaagacagagaaactggtcctgaggctaaagtaattcttgaggttctagggggtgggagagatgctttcagctttggatgccagatactttgaaggctcttttgcagcaagcttcatgagagcagtttgtagagctgtggtgtgttggccattgcaatcaaggataaaagagagaatgttgtttccaaatggataaactggatgactgacaatgtcattcattatcatggtgtcctacaaaagaggaatagcttggggaaaagtggagggagacattgctttgagctctgtgctaagaaccataggtattatcttgcacacaaaggaaataccattatatatttcccagtttaaaagctacctaagtttttctaattcggtctatataggtctttcagggcaatgtagagccccattagcctcgctgtctttcaggaagagtatggcccctctctggagaccaaaacccaaagcccaaagaaatggctctggggtgacactggagattgtgaataggctgttttgttaccacatgactgcagattgtgtattgcacaaacccagaggtgctatgcatgtcaagatccatgggaatgctacccctagccccacaccagcctagtttcccagttttctctaaaagactataaagtctgtgactctccagtaagcccagagccaagaagactcaatgaccaaagccacactacattctttgcctatgtgctctttccattttgttgttgttggtttttatttgtttgtttggttggttggttggtttggttttttttgtttttgtttttttgttgttgttgtttgtttttgttgggttttggtttttggttttttgagacagggtttctctatgtaacagctctggctgtcctggaacttgctctgtaaaccacgctggccttgaactcacatagatccacctgcctcttcttcctgaatgctgggattaaaggcatgagccactaccacacagcatgttctctccttttttacagctttcatccatctccatgtcccattcccactcttttctgttaagatggaacattagagatggggtaataccaagaaaacataagcttacttcactaagacaccatggcttgcaagagtgccccagacttgtgcactaaactcaaaataaccacaaatatccactcaaacagtgctacgccaacctgtcagctttttatttgggtaacgtaaactattccccaaaccacatactgaaaagcaccttttccattgatgacatgtcctccaggacctgagctggtgtgtgaatgacaatgaacacctcttttcttttgagacagaccactacactctgacatctggttagctgggaaagctttggttgggttctattctaaacgtcctaaggctaaagcagttctcagctgctggtctggatgatcccacagtgagaaacccagctgactctagacctagccaaaggctcatttctcatcagtgtgcaagcagatgacactgtacttactcagaggagtgctttggaggccacagtttcctgttcataaatgctctgggcaaaaagcactgactcaagccaggcaaggtagagcgtgactgtaatcccaaagattgtaaagcagagaatcacaagctcaaagctagcttgggctagaaacatccctgtttcaaaaatcaaactagggtagcaactccagagcatctgcctggcttatagtgtagtggatgccaatcctgtggtgctggatcagaataccatcaaccctgttcaaatgtgttctgtagcttctccatcatagctgcaccttacactgcagtcctttcccaagttcttttaaaaattcctttttaaggttctgagagatgactcaatgggtaaagggtgacaaacgccagtttgatccccagaacccacataatgagaggaccaactcttgaaaactgacctctgaccaacacacacacacacacacacacacacacacacacacacacacacacacacacacacacacacaaatgtaataatgaatttaaatccattcaggataaatatgttgcttcaattccccattgaaacacttggcagagcttttctccaatgctttcttcatgaagagtttagcatgtgaaccctcaccctggaattatgcatcccagagtatacattgacattcagttcaccctccattttttcctacagaaatccatgaattgacaaaagccaaacttcagacgcaagtgcctcagctgtcactgttaaaagtggcacatgtgtcccctggactctcttcactttctctttacaaacagcattcctgggatattgatgtgtcctgcttttccagcagcagcaggtgacgcccctgaggctgattcatggtccacacgttgcagcgtgtgggtggcagtggcccccacccatcagcagctgcctaaattgcatcagctggtagtatttggggttaaaagaggttcagcaactagcctaccctgtatggggacactggcttcttgccagccacacttagcggctttctagccacccctaggtgattcctcagttataatttttccccaaagttcatgggagcttggagtttgcttccatgaattggatcttgacctgaacacttttctgagggaaattctgtaaaagtggaaaatatttccctagtcataggcaggaaacccttcttcttccttacctttcttcttcagtctctcttacaaaggaatagtgtatttaagaaaggccaaggcactgccacacaaatggctaacagaacagaaacctgaagggctgatctgaattgcaggatttggcttccccctctgcttcaactctgaaccagccagcaggtggaggaagagccaggagacactggctgagaaaaggaaaatgccttctcactcccatttcaatatccagcagtagttacccagagctgtgttttcatggagggctagaaggcatgtctaacccaatggcagcaccttctatctgctgttacccttggctcgttccttgctgtcagctatactgttgactctgttccttttagtttaacacagggtctggcctagaatgaaaacactctcctctcaataacagacaagaaacacatattcttagtagggaaaagcaggcaaatctctccaaagtgttttgtttgtgtgttgatctgcttcatagtcctgggaggaaacctaggcctcacaggcactttctctttggagatccgctctcatcaagtgtttcaggttgccttgaactcattctgtagcccagagaatcctaaatacttgtagtcctcctgcctcaaccttcctagtttctgggattataggcctgaccaggctaagaactccaaagtttttggttcttggagattataaccatggctcacagaaattcaacttcacaagtctagagtcccattgtctcctggaagtagccagcccatgttcagaccttggaaggaacctccattattctaaaccatacaaagttaaatgtcacatatacaagacatcaaaataaataataaaacaagaggaaaatctggcagtcaggcagtttaaatatcataaagatcaatttatgtcaattttgaattgcaaatagtttattcataattatattctaattatcattctaaaacaagtacaaaaatcagaacagtaaatgtctttccttaataaactttctacatacaaatggctcgattacagacatgatttaccctcctaaggaaaacaccagctaaagtaaaactactatctcttcttgaatattgtatattaagcatgaattttattattgaaaatattcattaggagaaatgcttgatgaccaaaagtgaccaaatacatttgtggtagctgagagagaaaggttaattgtgatttctagccagaagcctattctaggaaaagaccaatttagctataattgttcctctggctaatgcaggaaactggtaacatcttcaaacaacctcctttttcctcctttttttttttttaatgatgtagaacaattgctggcctaatgaagggactcggtaaataaattacgcatcccttttttttttttttttttttttttttttttttttttgctgatgattctaagagagggagtttccatcctagcattgctgttctgaaatgagactcccagcagaccccacaatttgaacattgccattagaaaccgagaaaatagctgcgatggaccacagctgcagtcccaaactctgcgtttacacttcatcattaaccacttacgcacacaggcccataccataagctgcaaaaaaaattaactttacctctccagcaaacttctcccattcctaggggaagaacagtgggtgcttattccagcaaagatgcaaggcagttatggagttcctgcagtaaattgctttttctctccccactcccctaccctgtgtgtttctgtaaaacttctaagtagtcaaacaaccacagaagtgatcagaaacttctctattctgaatcaaatctcctaaacactcaatgctgatcggctgaggggagggcatggactaaaagtagaaaacgaagtctcagcattaatcaactttaatggtctctcttaaaaactaagaggaaaagaaagaaaagctatctacatttgaggctgtacagcttcacttccagcttcatcctgcatggaggcccttcctgccctttgttgtgtccagtaaatagatgacatcctgccttgtgctggaagcattacctcaacagattttagtactggcttctgtgaaggtttaaaggttacaggcaccatagattatgcattttctcttatgccagacccataaaggtactttggtctccataaaagatacagcttctaaatgggtctgcttttgtttcttaagtgccaacactgaaacacttaccatatgattattatggccatgctagagaaaagtggtcccacattcagaatgggtggcaactgccgatacacagtgaaattttggttcactgtttacattttcagacagtaaaacataccagaccagcgtgcggagcctatcaagaggctgtgactatccccttctgcctctgctccagggtgtggaagggagcagaaaccagagtcagcataccctggatgctcgtggaccctgtgctgagcaggctctgagggagtgccactctgatccaggcagagccctggccctcacaagggctttgccactctcagccaaagtactgtcccagaacttcggggaggggggtgttttggttggttggttggttgtgttttggtttggttttttgttttctcctttctcatgcctacaggtcttttgcatctatggaaggaaggaaggctggggctctttttctcccggaggaggagcgcccttgttcccccactgtcctttgagagcaaactctcttgggagtgaggccaggacgaagggactgtgtggcaaataagtcacatcagttcagacaggcctcaccaattcacctctctctctctccactttgcctggctgtgaggggaagatcgctgatactagagagttgccaaggttctttgctggtaccgcttgcacacaccgacaaccacgctacaaagttgttttcatcctcatcctcctctgcacaccttttcctccctgcctgcagcagcacacacccacgcccggacacacgcacccctgaagcttcaacttaccagtttagatttggcgcgttgcaaaaattcttccatgtctcttctagggactgggaccaggggtccagatggagagctccaagagggatgagagcagcagggagaagcaagaatctccagaaagtaatagcttgttggggctcagggaccagccgctccctaggcgggctggtggggactgagcccttctggcttccgctggactgctggcccagcccacgccccgcagcagctccagctccgactctgtcctaataaggaaagtgggtgtgcctcccgggagcccagggaggacacaggcctgctggcatgcgcttggggggcctgatgcggggctggcggtgggggcggtgggggtggcaaggggctccttggccaatcgcagggccccgcggtggcctcctgacgcggtgcgctgaaagatgctgcaaccatggacagcgcccagaagtgctcgccaagtgccaggggctgctgcagactgacactgctgcaggccccaccgcggtcagcaaggaaaggtgggaagagggacacaggccccaggagagacttggcctcggccagcgcctctttggctggctggcactgtaccaagagcccagtggtcacttaatgagctagtctgctggcctggccggggatgcactcagagaaattggcgctgggagggaagggggggggcggggaggaattgctgagctaaaagccatccgaccttgatggctaataaccagaagaacggcctggaggttgtataagctgcaactttcctccctaccctccaagcatactcatccagcaaccgatttcctcagctcactgcaactagacgcctttccatgggtcctggggctaatggatagctatatccttgtgccgtctccatctacacttgacatgtttgctcggggaaaactgggcatacaagctagcatcagcatcacagagcttattaaataagtgtcagtttctacaagattctcagacatgtctatgtacattcaagtttaagaagcactgcaatagacatttacatttgcagccatgagtttatgttataccatggagttttctgtgcatttgttagtcttagctccccaggcttcttgggggtgggggtgtgcacgactgcctataagatcccccattgccttctcctcagcccttagtgcttaggccttagcacagaggtgtttccagcctgcctatagtcagagcatacaaaccataggcttcccaaacccttagacctggccctgtttcagtccaactaaatcagcatcatgtggtctgagccacagtattagcctggtgtcagtgtgctgcccatgaagtacagtcatgaggctccaggtttcaatgaactccagcatatgcctgaatcactgacaagaaaaggaaatgggacagacttagtagacttcctaggggaagccttaccctctccaaggagcagatgggaggtggcaggggagtggggagagtggaaggagaggagggagagggaactggaattggagtgtaaaaaataaattaattttttttaaaaaaggaaaggaaacgtgttgctgtgctgcgtccagaatttcaagtctacgtgtgtttaagactttatatagctaccagtctcccaaggtttgcacaggtgtcagaaccaggtaccacactttaagaatgaagtttgttgtccagaataccttcctgacacattcacccacagaacacccactgccctgcctgtgttttctattagcaacttacattttctaccatgctataaattgcctggttgcatgtctttatcctcctccaagctgtgagctccatgtgggcaaatgcctcacctacctcattcatagctggatccctaacaggacaagagttattatgtatgtctcaaccctcagttaaacatatgctaatggacaaatgtatatctgaaaagatagtgcgtgtggtcttctctgtctgatactgtatcttcgtcactttctcaatccttgtatgtacttacatactttctgatccaatcattttttattcagaaaaactctaaagagatgaaatcagcagtcttccaatccaattagagggaagtggtgggactctaaagccccagggcacgttcaggtgataagccctgtagaagctgcagatcctatctgctttctttgctgacttcaggaacttaaagtcacgcagataaaatagtgcagacaattccattaacactatagaggaaaatccacaggactgcttttgcctctggcttcactggagaatttaggggatgtcacacaataccactttatccctctgaccttttactttttccttttctaccccccctccatcccctttctttttctttttagacaggagttcattctgtagtccaggcttgcctggaactgtgtaaccccaggctagccttggatccatggcaatcctcattcctcagcctcctgggtattaggattgcaggggtatagccccatgccttctctgccttttgatgcacattctggccttgaaattacgaaactttttctgatggtttcaaatttcaacgtctttatgccccactttttctctgctaatggctacccttcaaaagtttgccaaaatttccctcctcgtgaagttttcctgatttgaccacccaagctaatttgagactgtggttaaaattcccacaaacctgtgacttaaaacaatagaaactcattatcttatagttctataggttggtaagtcttgctgggctaaaagcattttctcaatatggttgcagtccttctggaggctataggggaaaaaattctatcttttccaactactagaagattctgtattcaatgtgtaaccccttccttcatacttaaaaccagcaacattgcatttgtgatgattcttccagttttctcctcctcctttctgtgctaggtactggaccccaagttgctcacatatgctaagcaagcactctaccacttttaaaatatttgacacagaggtttcactaagtttccctggctggccttgaacattctctatagctaggcagatcttgagtttgtaatcttcctgcctcagtctcctgagtattcgggattacaagccagtataaccaagtgttgtggggtatcctctagagaagaatacttagacacaggtttaagccagagtctttattagctggccagtgaccacactgtgtgttctggattccagtgtagccccaagcctttcttagggtgcacttttaagaaccaaaacattatcctgggctaacatacatcagttaacaagaacagaaaacctgaagcagaactacagctttcatttcttccttcagcatacatgaagcctcagctgtgcttgggttaatgtctctaactcaaggtgcctaaggcataatctagaccttcaataaactcacggagcagtcactgtagttcaaggctaagggaagcagctgagaagtggatcagctttggtactagttttgatgcaacacagtatggcaactaaagtctatagccttgtccttgatctatgtggtatactaaataaggtaggcaattctttgacattgctgttatgagaagtagggtctgtattctctctccttgaatctagagcaactccatgactccataaataatcaaatacactggaagtggcatcttgttcatttctaagatgggtggttcctccttttgcctcttggaatgcatactcttggagccttccccctgctgtgaggaagctaaagccaccttaaggagagtcccaaacacagaggatcaggggctgcagtgagaaggccagttgttagctatatatggggagttgtctcagcttctccagacccaagcattccaatgtggaacaaaaataaacagtgcctgctgggctctgcccaaactcttggtcacttacacactaagcaattttgagcaaacttttccccccagtgcttcagtccctccatttataaagctagaggaaccttctcccttatagtcactatgcatcctgcatgcaatcacacaagcaacctgtcccgctcccactcagtaatgccatcattgattgcccttgctgaggctccagtaagaacaggagggacaatgcagtgactgaaaggaggctcttccttgaagcaagggcgtctcagaggcactgtgaatgtactgaaatgacctccttggggctcatgtctgacccccaccacataacacctcctacgattttgctcctttggtgcctggattttacacaatgagaagtgtttccagaaaggtaccacaggtatttctcaacagcaacacatccaccagcacagctggctggtgacatccatctaagtttttgaagacccgtgtccttcccattctcagttactccttcccacccccaccaggtgcctgctctttcttcacagtctttcataggaacgctgtgccgacattcacctccaagtaattttactgttcttggtgccactagaagggcagctgggctttcctttccaggccagctccttattaccagaaaggagggtaatgtgggcatctccttggttagaaacgacaactggcatatgctgtcccttttaaaatgaaactcaagtagcatggcagatgctgagtcaccgcttgtgggcatttccccgcctgccttttacttcgctggccgcccctcccccacccgggctgtagcaggtgtagtcccttggtacagacttgctacctgtttttaactcattgttgtgatacaagtgaaggaactgcatctcctgttgaacttggttagaaagaactggaggcctgcttgaggatgggagacagaaagtggacaaaggtgtgttagcctgtatcctttgttcagcttctcaccatctgggaaataccggcttttcaccctttgaatggtcagatatgacacatttagacaaatcattgtgagaggaattaattttttaatgtgttttgacaaggatattaaatttttaaaaatgggctttgtaaaggctttattttaaaagaagaaatgctgttaacttccatctggtaagaaagaagaaaggggtcttactgggcttgtcagtggatgatggcacatcctagctcatttgggagactatcctgagagtcaaatgttcaggctttgaacagggcacacagcacttgcgtcatttctgggaagcacagacgtcctgtggagcaatgaatttaatttgaaaggacagcagagagggcaagtgctctgagtcatccggacaatgggcagcggctgccactttaagatctgtggctgttgaaaaatgaagcataaggcagtgaagtctccctttcctcaaccatccgactaaggtctaagggttcacattttccacagtctcttcctgcagaaaggtatagctcagttcccttcagaacgaaactgtctgtctcacaaaagccatgggctgtgttttatcattgctgagtatgccctggaagttgcctgtgttggaaacttggaggctggtatgcagtaggaagaggggaggccttgagggaggccatcagataatcctgttcatgactttgtagggggttaaagtttgtcagacagacaggtgagttcatttcctttagaatggggtggttaggaaagatcaaggctcatcccttccaggcctttggcttcctcgccaagtcagcctttccatacacagtcccaccattttgactctacaccatcagaccccagaaacaccagtgtcatgcctttagatgcccaaaactgggagtcaaaacaaaaacacaaaaaactctgtactttaattgtagttgccatctgtagtagcctgtctttttggtgtcactctgtatcaacctgtgctggtgactgaggtggaagtatagattgagaaatggcagataaagatgctaaggaaaagacagagaaacagaatagagtcagagggcaatccagtgaatactgaacaccgccaagttttttcttcaacattcttaaatatcccaaagaggggaaaatggcaaaagacttattaatcaagatacaaagaagaaacagccttccttaattctccaaacatttggtaaccacaccttagactaaatctcccattatctggccttgagggttaagagtaatcatacctcagaccacgactcttgttatctagataagacatccatgcctaaaaccaaacatcctacagtacctacataccttagaactttatgtcttatgacctcaacttggaagagtaaggatagttttgaactctctgaccttaagcaaaatgaaacaaatttatttttatgggccccaacactttataagtatccaggctgtaatattttgttacagcagttcaaaacacattaacggtgtgaattttcactcatgacaccatcatacaattccattaggaaagtatttggtgaggtgtttggaatttgaataattttcaaggtctgagaagccggctttaattgtttagacactgacttttctatctccccatctctttgtcctggcaataaaaaacaagaaaaagaaaaagacttgaatagatgttctcaacctcaaaaatctaccattacaaaacttatctcttacctctgaagtagccttataggatgaagagtaatgatcactaacattgactccttatcagaaataaagaaactgagatccccaattgctcattagcatgaccaaagactgaaatctagcctttggatttgaaagtccacatcctttctcttgagaaggttgctgccttctgcacagttgatttgcatgaaacatcaccataaagttctctgtgtgcccataacactaatcgttctaatgatggaaagggcaggtattgtccaaagatgtgcaaactaggtacaaaaatgcaaactgtacaaaattattcaagcagcaagtagtcaaaccaagattccaactcaggcaccagggtccagagcccagggaccaaaaccaaagctcaccactgtctatccattgtcatacacagcccagtggcccatctgacaaaggaaatttggagactggaaagaaataagaacacaccccactgctctattaagtgcatacctgagattagctggccacccctcacctagagagtacttcttgaacacagagacttcacaactctacccaaaggtatgccagagaaaccaccagaaggaaagagctgcatgtctcagaagcacaagcattctagatcttttggaactcccaccatagactggctcagctaaatggtggcctctttcctacagtcagtatccttcccctccactttccttcactccactgctaaagcagaaaaatatcacatagtgatgggcagaagcctgctttaattgtttagacactggcttttctatctccatatctctttgtcctggcaataagaaaagaaaagaaaaagaaaaagacttgaatagatgttctcaacatcaaaaatctactgttacaaaactgaatcacgttagggccataaggaatcagaataaatatctttatggacacttgttatatttttaaaggtcaccgccctaaacaaacaaaagcagagcaagcattttaaggagcctcagtttgaagctcagtaattaagagatgcaaactggcaagtctggaaagaggaaagtagcaagctggatttgttttaagtctttgcttccttgtgtcttaaatgctaatgtccttggaggaatcatctattcatggcaggaagcctaaaatttaaaaaaaaaaaaaaaaaagactcaagtttcaggttggaggatgttgcactactgtcatctaaggcatcctcagtctcacctcatgactgagagaaaagaaagaatttagaatttaacgtgtttctgctatgggataatgctcttgttcactgtaaagatttgtcactgtaaagattggtttaataaaacaataattggccagtagtcaggcaggaagtataggtggggctaccagactaggagaattctgggaagaggaaaggcagagatgcaatcaccagccaaatgcagagaaagcaagatgagaatatcttactgagaaaaggtaccaagccacatggctaatgatagataagaattatggattaatttaagttgtaagagtttgttagtaataagactgaacaatagcccaaacagtttataattaatataagcctctatgtgtttatttgggactgaacagctacaggatggggctgaacagaaatttccatctacatgtttccaataacattagatgggaagtagtaaaataggagtggcctttaaaagttttaaaatactttttactttcacttatgtgtatgagagtgcacacccatgctcataaaaccccacatacacacacctatgcacaaagaaggaaccacaccccctagagctggagttataggtggttatgaactgcccagtgtgggtgctgagaattaaactctggtcctctgcaagagcaaagagcagcaactgttcttataaccactgagccatctctcccagcctgagatgtggacatattttttaaaagtcccacgaactgttgacttacatgaaggtaaaaagtttatttgctctatacatccctattttagattgctgcagcataaaaactgatgcaaaattccagaaggagccaggttcctgttgccacacccagcagcagtggcagagccatgctttcccgaaatgcttcactacctacttacccagccagtgcccctgtccaactctcttccccacatttagtatagtataacccatccttgcttatacagctgaattgagggagtcagcaaatggtcctctctaggacaagtccaccttagtcttgcataggattgcctcggaaatttaggataggaacacaattcacttctaataatttcagagatacccctcctatctcattcttactaccttgatgaaaatagaaaaataaatcaacaataacaaaactttttaaacgagatttgaaatggtaagtcatcaactggacataggcatcctgttgtcacttccaaactgcagtaagagtgcaatgtggtcattagcttgattatcaataaatccacacagctccagctccacagcagctagttgaaaacatttattgactttaaaccacaagaagaaatgtcaaggaaatcgcccaagcaaaccaggacgagtcagggctttgaaaatggcaggtgagttacaatgaatgctctgccatctaccaaatgcctgtttagcccattcctcttcttacccctctccatagtgctgcctgctccagagacagacatccatctcaccttgctgcatcctcccactacatgcggcaacttgatctttccagataattacttcctcggataatgataagtgtttttttcaattcctcccaagctgatgcctctcggaggagaagtgcacaaaccaaatagacacaggaaaaaatataggcattttgaactgcctagttaggttttatcaaaaggggtcaaaatgatggcttttaattatattcaaagacagcattttccagaatgctggctcaagctaacttagacctggaaacatgacagatcgagaaatatagaaatcactaagactggatgattgttaggaagaggaaaggaacaattacctacctccaacaagcctacctccacctggttaatgagcttctctgcctggggcaaagcttccaatttagaagaaatatctactatctttaatttttcatttatgtgtgtgcacctgtgtggggataaatgcatgtcattgcagttgccttttaggccagaggatccctggagcctgtgtgacaggcagttgtgagctttctggcctgggtgctaaactcaagtcctctgcaagagcagcacacactcttcactgctaacctacctctccagctcaagattttaaaataatctcaaaaatgttcatatgctaactatcattgcaattcctcaaatatttgtgcatgcaaatatggctatttgaaaccaaataattaatgccggaccaacagtgaactgttcttgtagcagaggaggctggggcagagagaaacctgggtctttaccctatgtgaggacctagtaaaggctgagaaaccctgggggctcagaaatggggcagacctaaatgtaacaaaaacagagaaagtgtgaaagagtccaagaatttctagtctgcacaaatacattcatggcaaatgcctgcaatggtctctttcaaaagcaggtattgttctagtcatgggagacaaataaagacaggtagagtcatagatatttcaagtgtgtggtgggggaaaataatgggctcccaatcagtcactccaaataagagaccctagaaaccaaagaaagagccaaagcaggaaagtctctctggccttctctcattttccaaggaaaagcaaaccagcatacacaagatacgtagctcagcatctgtctcacacagccgtgaatgttagctcgtggtgctccttctaagatgtcttgtttctgttgacagggcatttgatgcttacgcagctgcagctgaactggctcactgaaccactgggcttcaggccttacatattgaacccagtccttctccctctacacgtccatgtggacacttattctcccaaggagaaactgaggcttgttgagatatgaggggaaggattcctatgttctcattggagaggaggccatcattcttcctccagggaatttcctcagaatagcttcttgccaatctttgcaggatgtaagggaatatgataccttgccgaccagcaaagcaagcagattatgcagtaggactgtggtggaggaggccttggagttccttgcatagtccagcagcaaaataggagctgaattctcatttcactaagccttgctgagtcttcctcatgatcatctttcagagaatgtatagcatcctacagccaggttacacagtggtcaagtactcacttctccaaaacactagcaacaggtgtgctttgcttagcaaagtgtttctccaaggtcaaggacagcctcctggaatcataagtggatgatcatgaaacctgcaagattctgatcaccctctctcttctctctgtgtccccaaaccctgtgcattaacaacaagtgccaaaacaattatttaaaaggattttctaaataacagttctccaaagtgcaagcatctctggaattaccacataactgtgccaagcctctgcaacactcagttgtccttaatggaccacactgacccaggagtaccaaatatgccagcccaaatagaaattgtcttcaacctttaaataagctataaaaatgaaaaactagagctacaacagacatcacaaactatcagtgttagaacaccagcattacaactagcatgtatgtctatttttaagccccagtgtgcattttaaagtacaaactgaagacccttgtaaaaagtactaagattggctttatatatatacacttcccagtggtgtcatggtcactgctggtgatcagttctccggacaacagggaaactctgattgtagcctttgttgattttcatgggggcacaagcttcagctgtgtcctttggagaggacacgtgtacatgtgtatactagtgggaggcttgggtcaatgctgaaggtcagcagtctgctggttcaaagagccaatctacctgcataggggccagttaagaaagagcatgatgccaacgaacatagactggagaggaaatacagatgactctcctcatgagctgcctcaagtcactgtcagcatgccacccaccctgccgaaagggcattagaaggtgatgccataggactcaaaggctaatcctagaaataaggtatcagaaatagtctacaaagtgtgaaaggatgcatctataaaaatgtttgtcatgggtgatttataacgtcaaaacattttcaagctgttcttcataaatgcagtgacaggggctgtattttgttcacacattctgccccacctcccaatattttaggaaactgaacttatctctaagttttcactttctcgaatgctgcatatctggaagtacacagggtgtattctgttcaaacttcatccacttacccatgcaacttttgggttcccccttgccatttcattttgggtttagtttgtaacactctatgatctagtccagactggccttaaatttacaaacacccagtctcaggctcctgggtgtggattacagctgtgggctaccagcttcactacttcccattttaggactttataattcattcctttttatcaccaagaggtgagacactattccaaactcttttcacctcctttctcaaaacagcaatgtatgttcaatgaggaatatgtttttcctagcacatatcagatagttcaggaatactttctttttcactaagtgggatgcagtggctaaataatgtcttcctttccacaaaagacatcgatgtcataatccttgtgaatgtgctatattgaacagaagagattttaaaaacatgaagttaaggatctggagatagctgattatcctgggatgtctgctgagccccctgtaaatgtggagcccttatagaaagagatatgaaggccaaggtcagagagaattaagtgaaaagagaatctgaaatcagaatggtgtggccaaagaaatgtgggaagcctctagaagcagggaaaggtatttaatggagcattcatccccagagccccctgaaggaatgccctctgccaacacactgattttagccttggaagactcagtgacttcagctctgacctcaagaatagaaagacaattcattgttttcagccacaacagcagctagaagcagacacagatgactgagctccaggtgccctttcacttccttcctgcaagtgtcccttaagcctagatatctaaaaatgacatttcccagaatctatgacagcagggatctggttgtcgacataatcccgtttagatgtgtctgtatgtattttagagagcagaggtgaggcagaggtgaatcgaccatatttcactaggaaaacatgcttgaggtgacacattctggtggtggatcagtactttgtgggaatcaggaggcagttcgtgaggaggcagtatggcttcccaaatccccagcagccttctgacttctcaccttcctgaaagaggcagctattctcccaggtggtaagctccactgtgtgtggggtggggggagcggggcagggtctcccaagggctcagcctagacacgccctgccagcaccaccgatttcctatgcagctaactctatgtcctcaacttctctctgcttaaaataactacagttgtcccttttggccacgtcaaaacctggaatgatgcagcctgaagtcttactccatccctggggaggtggaaggtcctgctgatgaccttgatgttctcagagatgcacatccacaaaccagcagctctaacccctccagcgcagtctcaggaccacacaactatccctgccactgctgtattacacattttatttgcttttctttaaccacatcttctcaaagttgagctttccttttatgatccaacaacatgatagtaattttcatgggtccagacaacagggattgctgtcaaaaatttaaagggatctagggagatccactaaaatgcttgctgcctaatcatgaggacctgagttcaggtcctagcacccacactgaaactcgggaatggtagtacatgcttataatccttgtcctggagaggtagatgaaagagcgtgcctgaagctcactgtctagctggcttagacaaatgagtgaactctaggtttaatgagagaccttgtctttaaaaagttaaggtgtagagccatcagagaagatgaccaccatcacctcaagtctccacacatgggtatactggcatacacatgcatacaccacatacaaaactcatgcacatatcacacacacacacacacacacacacacacacacacacacacacacacacatatatatatatatatatatatatatatatatatatagagagagagagagagagagagagacatggtataaggtaaggtcccttaatcttgtaattttttttttttttttttttttttttggtttttcgagtcagggtttctctgtggctttggaggctgtcctggaactagctcttgtagaccaggctggtgttgaagtcacagagatccacctgcttctgcctccctagtgctgggattaaaggcgtgtgccaccaacacccagccgaacaaaggacatttattatgcctctccctttgaaagttcagcaaagcttgattaagaactctacttacactgatttggacccacaattttgaaagatagtctttggcttatgactcttctttcatgtgaatggctgcaaaaatattatgactgtcttcagaaactttcagatttcccagaaatcatttggaattttcaaaatttaatctgcatatctcatacttttaaaaatgctttttcaaagcacacacagaataataagttgtgaaggaatcaaggtcattggaattaataaatttaaagatatagatcagtaagtttcaattaaagttaagttacctttctacagctccatcctgctctggacattttgacttgttctttaattccttgtttttaaaagagcatagacagaaactgacaaattttcctaaacagatccacatatttaatgttttggactctaaggaccaccaatctctgttgcagttgttcagttctgctattgtagttacagaagtggacacaaagatgagcacagccacaatccaataaagctgtatttgtgagcactgaaacttggattttgtaatgttttccatacacactatatactactgttccatttgaaaatggacacacaactgctctggccatccatcttgcccaaattctcagtgtgataaagacgtggtacagccaggatagagatcttgccttctgaattccagtgtttcctgggagaggagcagtgatttttctttgttttcccttccagtgcacacacagcccttcctcttcctaccccaagacgggtctccaaacctcacagaaacattctctgataacatcagtgtacttcctcctaaattagcagggcagttaggaatcacagggagcacagaccccaccccctttctccgggctcctcctctcagactttcattccttcttcaaaacagtgtcactcttccatttctccagaaaaacgatgtaaggtcactggttggcctttcacccactacacagaattgagcagctaaatgcacagatccatggagggctttctggctgctggataaagagtgccttggcatggtgtaaggtgcaccaactacaaagtgacaatgacaacagtggagggtgaggagaaggtaatagacaagcattgccctgtgttgcccaaacctccccactcacaagggatggagccatctgcctcagcaggcagatttccctggtgcccaggaggcatgtgtcactaccaatggcttagcctttcttgagcaaaggcttacactgtcaccactgcagctttgtggcaatcctagcagagccagcatttagcatctgaatcaaaagcccaggtccccacacacacacacccccagtgctttaaagaaagctaaaattgatttgaagtgtacagagaattttcttgtaatcaatgaatctcaagaaaagtgaaaaatggaaagaataagcttgaggaaggagaccaaaagagccttttgaagataaatgactattgtctttttaaatgttataaagattaataaggcaatataacataatcacaagaggagtgagtcacagtctcatgatgtcaccatgatccatctttatctgaccacttcgctaattgaaaaattttataatcctaacatttaaaatggtttcaggttctaacatacagatgctagttttgaagtttcacacaaatcttagtaacatttccaaacaaacacaaatatcagtcttcatgaggatggagactgataggagtatggacttgctaaccacatttcagtcctacgctctttatctctattgtatccacattctcagcacaaaaataaccggttaggttctgccagcttccagagcctgactttcttctgttatgaaccctttgtgattattacagataatgaaacagttaccagaagtctctcattcatttttctgctttgatggctgtgctcacacaaagatttttcagccaagaagtcttgatgtaaatctaacagtctggccatcagtgatcattagtgtcacatctaagaaacaattctagaggttgttatttatcaaaaggagacaaaattgcctttatggtcctaattacaatatttactcagatggccatatttatccacagcagaaaataatgccaggcaactgctagaacctcttcaaaaggcctatgagccaacaaggcccagttctggggaatagtgcctgtgttaattggggtttctattgctgtgataaaacatgaccaaatgcaacttgagagggaaaggggtttattccactttacagtttacagtttatcacatagggcaggaactcaaacaggacaggaatttggagacagctgattcagaggtcatggaaaaatgttgcttgcctatttgctctcccctggcttgcttggcctgctttcttatagcacccagaaccaccagcccagggttggcactgcccacagtgagttgttcttatgaaattaacatcagtcatgctacaagcttgcccataggccaatctggtggaagcattttctcagttgagcttccctcttttgaaatgactctagcttgtgtcaggttgacttaaaactagacagcacaatgcctgtgaaaataaataccacattcacttatagagtactttgtgatgaggtaataagcctggcaactgagaccccaccttttcatccacatgaagcagatgcctgccaacagggaagcatcctctcccttcccaagatactgggatgtcatggtctgctggtccctctcctgtccctcagtcaactctgcaaccaatagctttatggccttgttctaaatctattaaggggtatctttttcttaagtttactgctttctgcattctccttgagttcagcaaggaatttactctcatttgtctatcatttgggtatgttgtggtcatggagtttcacagtacctggtcttgctaagcctgtagaaatggaaatctcaaaatctgtttttaaagatttgtttttattatttatattatatttgggggcaggggtatatgcatnnnnnatcccttcccttccactggcatccagtgccttggacagctcagtcttatggctttaaatgacatctaaatagtagtgatctgttgtttttatctctggccctgacctctcccaaactccagattagtgagtgcaggtgcctgaagaggccagaggcactagatgccttcagaacttgttacaagtgattgtgagccaccaatatgggtgctgggaactgaacccaggtcccctggaagagtacttgctcttaaccactgagccatctctctaatccctaaattctgtttttaaaactggaatctatatcatgattacttgaagatttataatgaaacctgtgataaatgcttagggtttccccatgcctttggctatattttacatttatttgtatttattttgcatctattttgttttaaatatcacacagtgaattttctacacagaaagaggatcaaagagacagaagtacatattccagtaaacttatacaaccccaggattcatacatgtgcttgaggtgccctttctattaagtcaccagggagcttataaccccacctaagacacatcaaaatctccatccttgagaatgtatttatgtcaatcaggaagtcctccaaccttccagagaagaaaactttgttcaaggacgtttttctttcttttcagttctggaattccattctcacaggaatggcctctgaaaagggcaaacttggccttttttaaataaatgaaagtgttccgtctcagtgacatgttgtggagtattctttgacactgtgtgaagatatgtcactgtgactggtttaagaaaaaagctaaatgtcctatagctaggcaggatttttgaggcagagagaatgctgggaagaagggcagaaatgtcaagagttgtcagcagaggagagggaacatacatacaggaggagatgtaaagccacagagtcacatagcagcatgtaaattaatacaaatgggttaatttacgtcataagaattcgttagaaacaagcctaagctattggccaagttttcataattaataatacgtctccttgttattttttgagttggctgcccaaagaaaagtccatgtacagtgacatggccctttttgtctagtagaaaacaggcatcctctgtgctgtgctgtgggttgaggtttggggtcttaagaatatagaaggcagcttaaccaagcaccttctatggctgggcacaaagagtaagggcagagtggcttcccagtcctcccatttgggttccttcataacctgcaaatgtgatctgattttgtaatacagctgtgcatcattggggatgtgttcgaagaattgtcactagagaatttcatcattgtgtgaatcccagaatgtacttagatagggagattagtccatactggggcctcttcacaaaatgaagagacttattaaacaggacatatatgagggtactgctggtgtgatatgcgacactggttcttagcaaatacattttaaatataaggaaaatcaggagtacaatataaaataagctcaagctgagctctgagcatagaatttgcgttgctgaggttttgtgtcatagccagttggttcacagacccatcctcaccacaacagagcaataaactgcacctaaatgagggtttcactagatcagggcaaaaaccagacaagaaaacaactactaaaaattaaacaaacagcaacaataccaacgaaagaaagtcacccagagctaaagatgtgtgtttttaagcagaataaggcagagccatctccctaaacttctatggggggggagaagggggaaataagtcaaataagtcacttctgcactgcagcaacactaaaactcacagcacggcaaagaatgcttttggagaaaaatagctaagaaacatctcaaactatattcatcattcctaggaattaggaaaaggcaaaaaaaaaatgagatttcatattaccctagtcagaatggcaacagtcaacagaacaaccgacaatagtgctgaaggggatgttggggaatgggaaccctcattccatgttggtggatttaaaaatgggatttcaaagtggtccacaactaaccatgtaaaccagtgtagagagctttcaaaaggccaaaaataaatctacaatataaccaacttttaccactccttgacatgtggtcaaataattcaacatccaacttctcagccatgattgttgctgctctagtcacaatagccaggaaatggaaacaacttaaatatctttcaactaatgaatagatggtgaaaaatagtgcatatacactatgaaatactatccagctgtaaagaaaaatggaatcatgaaattccgaggtaaacggatggagctagaaaagttcatattgagttgaggtgacctggatccaggaagacaaacattgcatgttctctctcacctgaggcttctagcttccaagcaggcagacgggagagcatacatttcctagaataacttcagaaaccaggaaagtaaagcaggactgttagagggcctctgggcgtttcccgttctcttccttctgtaaatcttattcttacctcatggattgctgtgtagttggatggctgggtggctggcccctgacaccctcctccccttgttctctcattgcttctccttttccttaggtctccttctatttaactctcagcctgcagccccacctatccttgttcctgccttgctattgaccattcagctctttattaggaccaccaggtgttttagacacagtaacacagcttcacagagttaaacaaatgcagcataaacaaaagtcacatagcttaaaataatatcccccaacaacctataactaccagtttactaaaccaacgtaatcaattactgcattctaaatatctatccttatgccacagataagtgtagtcctctccccttttcaaggaaccttctctttacaacaggccgagaccaccctagaaagccacacactattaaattgcagattataagaaactgtatggtgcccagtctcagctgatacatatatatatatagcccagatcctgccccaaaggctcggggatcattgcagagcagtgggcagaatcattacacaatccagaggaacagaaagttttctgtgagattgtgggtcctagaaatgccagagtggcaacactcacgaagtctcagcttagtcatgtttagtcttgtttagcatggctacacctgaacaatgacaacaccaatggacaggctgacatggaaggggggaaacctcctggagcttcaaccctggaaaaagagtgttacgataaatctttccgccaaaagctgcctgggccccaccgccatgtgtgagctgcctgggccccaccgccatgtgtgagctttacgccagctgcctgcctgagttaggcccaaatgaatacacagaaacttgtattaggtacaattctgcttggccaatgactaggattctcatctgttagctcagtcttaactatcataaacctatatattttataagacttatcttatcggacgtggatcacatcgtgctgctggaggaagagaagaggggaaaaaggggcccttcctgtttctccctcacttaaatatgagtctccctgctatgtcacttcctgcctggatcagcacttctctactacatttcccagaatcctctttgactccgagtcctgtctacttgctgtctcattggccaaacagtattttatttaacaatcaataaggtaaacatacacagtacattccccatcaaaagagccataagcaactagggaatgctgaaagagggagaactggtcttcccagggaagatgcctccaaatggttatccagtaccaagaggtcatatacatataggtaacattgtactgactaagcaggttgtatttaggtatatgtgtgggtacacacacacacacacacacacacacacacacacacacacacacacacacaacaattaaagaaaaataggccatgaatctaaaagagagaaaggaatgccacaggaggggttcagagaggaaagggagggggaaaataatgtaattatattgtaatctcttctaaaaataaaaatgatttaaaacaaaacaaaaaagaatgttcctaaaactgatgtggaaacagttttaacctaactttctatagcaagaagaaaatattttatcaaaagattataatacctgaattttctacatatcatagtctttaaaatatgaatgtattttatgtatcaatctatgacataaaagcctggttgtgttccattgaaactttcagtaagttaatatagaaaacataaagagtgtgataagatggctcagggtaaaggcatttgcagccaagactgacaactggagttcattatccagatccacatcatgaaggtagagaaccagctccagcaagttctcctttgaccatacatgtgtcatggcacatgcatacctcccccccacacacacacacacaaataaatgggtttttttgatgttatgtcatcaaaagtaaatgaacacatttcacacctaccaagattgcaccaatgtcctgcatgcttttacttgagctcccacagcaaagaaacaaaaacttgaagagatttggagctggactgcagctcagtggtagcatgattagcataggtcctggcttaacatctgagaactacaaagaaaaacatatcagacacctattcttttgctgttctgggaacctgggtccaaaaggggtcagcagagtcgcccccccacacacccaagagaatctgttcagaatgctagtcattcattctgattatctctggcaatctacacatcctggctctgggcagcatgagttcaacctctgctccatctagggcactttccctgcctgtcagcacctcttctcttagggacactcagtatgtttgattaatgcttaaacctgatggctcaccttagcttgctgacatatacaacagtccatcattatagttcattatagtttattggggaagatgatttatctcataactttggctaaagactttgtgcaacatatgctctagcaaaaataaataaatagatgatgatgatgatgaagatagacggatgaaagatagatgatcgataaatgatagaagatagataataggagatagaaaaatagatggatggatggtagatagatgattgatagatgatagattataaatagatgatagatagttagatagatagatagatagatagatagatagatagatagatagatagatagatccaaacaaaaaagaccaaggatccaagaagcctgggagttcataagaaaataaagtgtgatgtctcaggacaatgcttgcatcaactaatgagcaaacaacccatttctctgccttttgagaagaggaatgaaagcttgatggttttgaggctgggggtaagaagtctcctggcaaataaaaaaaaatatatccaaagggggaatatagggtattctcacatgcatgcaacttttgaaaagttaacaacccaaactctagcaccacaaggaagtaagaatttcagaaaataaaatgttactcctaaatgggaaatgatcatttaaaatggggtatgtgggaagggcttggaggcagggaaaggtagtggtaatgatgcaattatgttataatcttataaaagaagaaatttaaaaagacaattgccgctcatatttaaaaaaggaaaaccttgaaaatttataactaaattttattacattgaaaaaaaaaacttggcttggtcctaaccatttacaagaccctataataataaaagtactgaatgttggtttaatcaagaaactctctgggggacaaagaatggaaaggaaatgacatttaagagggtaaatttttcaactattgtaaatggaaatgaataaataatgttgagatgataacaagtcaagaagtatcattctagcataacctgaagtgcacagatcaatataaatgatagccactatagttaaaacctttgcctcggaggggtacaactggggtggcagttgtgacagacagacaggtccactagcgattacagtatctttgtagctacttgacttttccaaatttttctaaaaaatatttttacttttaaatattttcaaagttttaaaggaaactcttttgctgtaaaactttgccctagtccttcagggagctggttcttcctccactgagccaataatcctattcccatgactctgttatagctttccacatttcatagttattaggttatgtcaaacctttctgcttacatggagcctacccactaccacacccgactccagtaggcaccaaatagcttctggccagatgggctatgaataaacacccaaccacccccccacaccccctcacccccactcccaccccccccacaccccgccgagaaacagcaatcattgtagacctcactatagacccaccccaagtcttgtcctgtaaacagttggttgctgttaacccacttctggtctcctccttcctcctgcatttcatacgggcatcagtctgaaggatccatttctttggagtttctggcttcactctccactgcactctccactgcatgatcacagccagtttctgatgtccaaagtttatagttagaatttgctcctcttatttttagggtggacttaacttccaacagttttccttctgctccaccaccaacccagcactcacagatctcacaccaattcagactccacgcagaagctgagatcttgatgttgtactgctattagaacacagactgcacgcacaagttcccagcatcagagtccactcagactcatcaatcaagtttcttaaatatctgttctaaggcttagggttgtagtccactcctgtaagcccaggactccgaaggtggaggcagaaggatcaccatgagtccaaagccagtcgagagcaagattttgcctttaaaaaaaaaataatggaaaacttcttcttgcagtagacgctaactaacagagacatccacagctggacaatgtgcagagagtgagagactttggaactcttaaccttaaatgggatgtcttcatcaaacccttcccctcaaggcacaggagtctatgtggatagggaaaagaaagattgctcttggaggtggaagtgggtgattccaagatgcagtgtctccagacacagcaggactgacatacttgtgaactcacagagactgacagcacactcatcatctgcacaagttcaaaccagacaaagtcccggcactgaggaggggaggcggacacaatggctcacccctagccaagaagtgtcactgggtaccaaccacactctagagcaggccccatgcccaggagcagtttgtcaacacaaaatggactccagggtcctttttgtgtacttttttgtttcgttttgatatttttgtcttattttctttatcatctttttttgctttatctgtttttattttcaattttgtttatttttcagagagagagagagagagcatatgacattgggttggtacagaggtggggaggatctaggaggagttgtggggagggaaaagaatatgaccaaaatatattatatgaagaaattattttttaaatctgttctggaccagagctgactgttactcttttcctgggactttgcctgttgatcagaaaagaaccggcatttttttttctgctccagttacacagacacagtgtgtgtgcagttttgccttatctactctgacttgggagatctggagtttcttagctgttttttgcctttcagagccttgttcaaacacaagcagtgctagatcatcatggtttcctttctaaaggtgggatggccgaacaagatgctactacacttttctgttgctgtattagagcattagggttagatagagtctatgacggtgtaatgaaggaacgctgggaggtcatatcttcatccacaaccattaggcagaaagagagggcgaggggggggagagagagagagcactggggattacaacggtcttttgaagcctcaaaacccttccccaatgacacacttcctccaataaggccatgtctccttctcaaacagttctaccaactggaggattcaaatatatgggcctatggaggtctattctcattcaaactaccacataggtgtttaccaaatgcttattgaaaatataactctgattaaaaaattgaaaggataaacaaatccatttctgagaatctcaatagagccttggatgcatttttccacccattaaatattaatacaaaaggcagcaaaagcttcccgtagaactgtcatctgttctttaggaggttctgtctcattccaatgtgaaggaacaagattgcttaatacaagtttgcatgcccatcaatgtcaaaatgtccaagcagtgcagtttatcaaggtcgttatgagagaagccagctttaatcagcacggttctttataattgtaagctgccaagacttccttataagagaggcttccctggataatgttccttaaaaaaatggtaccccaagtcctccttcatcatcatcggaatgccctgtcgctatttcttgtctgtgaagttcttaatagtgctaacctacaacttataacctacagtcatggaccttcacctgagcctaggcagccagtctatatgaagcaccatgggccacacaagaacttacctcagcaatggccatagtctctgtgacttgtgtcagggataaagaggtatgaatacttgtgaaaaactttgagctatattcttaaaatgtgtgaatcctgctgtatataaattatatttcagtaaagttctctttaaaagacacctgggtgtagctgaatactagagcatatgtttaacacctgtgaggttctaggttcaattcccaggaccacaaaaacattaaaactatagctggttagaggtcccagtggcaaactaaggctcaagaccaggatttgattccagggagacaccacacacacacacacacacacacacacacacacacacacacacacacacacagaatgtaataacaattttaaagcattaaaaaatagagagttgtacaaataaaatgtgtggctgaaagccccacaaaacagtataggccattgctgttgctcttggttgctctccagagctaagtggtgaaaaccaactagtaaaacaccatgcactttggtcacagattatggagaaatcaaattggaacaggtctggaagcttcttcctcactaacttgttttctttagtgccagaagatactatgtgtgctgctgagagaaaaccatcctcagccttgccctgcaagttacagtaatgccctgccaggcaagataaaccccttagagcagtggttttgtggttgttataggcataaccaatcactttccaattagatttgaagcctgctccccaggagagatttatgcctggtatcgtgaacctggtccagatcctgtgggacatcacaggccctggtcgggggccactgctattgttttgctaatggtcatgttgtcacattgcctgctaaattggttatgtgtatattcatagattagtgctgtgcctggtcgtcaccagcaaagcttctgattgccctggtggtggttaatgaggaaacccataacttacctaagtaatagtgagatgcatgaccctccttaagacatctggataaccccctccaaggctcagggagcatgacaagaggaaacagaaataatgtaagagccagaaagtggagaaatacaaagcaaaaacatgtcttctagatatatctggctgcttcactccttaactcactacacctgtggttctataccagccctgcacaagattggccccatcaacaggtatgggctggggagcagaccacatcaccatcagaacaactaaggaaaagccccttctgttgcactcagactccactgcaccttggagatgaggccacctttcctatagtgcttcccccctgtcatgaacatgaccaggacaagaagcaggccattcctgggagagacagcactcctctgatatgctctgactgtgactccttgggtagcttctgcaatgaattctcagtaccacaaccatctgtcactgcagtctgacttttcccaactaaccctgcccatcccacattctctcacaggtgtttacctaatatttcctgaatatatactaccacttcacatctgcttctcaggagacccaaatgaacacatccaccaatgcaaagaagagatcaagttaacaagtgattcagcaagaaaaaagctcactcacttattaagaacacataattgcactctacttacaaactacaagcctggctgctctattaaacggttgttcactgtgatgtccagggggctgagttctctttggagccactgactgacctgaattcagtttattgagaattgctacgaggcctctcaccaaaatcgacacaaatctcaaggcaaatgaattaatggtctcagtcattgtctgctctaaagggcacactaataagattgtcgagggaagaaatcaggtcacaaagaacaagagtctgaaccttgagggactgactgtgcctggctaggtctggaagcatctcacctgatttaattacttaaagcaagtgagcctatcacactcctccaagagggaacacagtgtctgaccatggcttaatatcatcacgacttgccaataaatcctgcagctccagcctgaacaagctctgctatggtctgggtgtggcttgtttcttagggatccatgtattagaagttttcctgtcctgggagacatcaagtgagtctttagtcactggtctgagatgttaagtcactgtaggcatactcatgagagggattgcacaatgctccttggaccccaggctctctctctggcttcctatctctctatctaacacaaacccccaccactgtgaagccatcctccctgagttcctcaccatagcaacatcagcatcagcatcatcctcttgaacatccagctccacgtatttcattatgataatggcagacagactaacatgttctgttattatccatgtgagaattgactttgttatcacagaaatgcggcttaagattgtctaaacatatcaaactctctttctcccccctcctctggtttttcagactgagtctgtgtatgcagctcagggtgacctggaactcactaaaccaggcaggcctggagctcacaagtctcaagtctcaatttcccaatcaatgggatcacaggctttcccctgggacacccagctttactctggatgtttcctctgaaaagctatgctgttcctctgtgcttcccaacaccaagacagaatgtacaaagtgccttggattgtcttcttgatgaggtgttcatgctttataaccagatagttttatcaaagcagaagaaagggactcagataatcaagacacctgtagagaaacaaaatagggaatagctgttttattattttttttatttcatttcacattccaaccacagttctccctccaatacctcctcccaaaccccttagctcccccctagatcatcctcagtccactcctcctcatgggtaagggcttccatgaggcatcaatatagtctggtataataggttggggtagggccaggctcctctcccatgcattaaggttgagcatggcatcccaccatagggaatgggctccaaagctaactcatgtactggaattatatcatggtcctactgtcaggagctcctctgatagtccaagctttacaactatcttccacgtatggagggtctagttcagtccctggagtctccacagctgtaggtctagcgttcatgagtttcctcaagcttggttcagctgtctctgtagatttctccatcatgatcttgacctcccttgctcatatattccctcctccctctctttgactggattcccggagctcagcctggttcttggttgtggatctctgtgtctggttccatcaattactggatgaaggttctgtgatgatacttgggatattcatcaatctgattaaagggctaggccagttcaggcatctctctactattgctaggagtcttagctggggtcatccttgtggattctcaggagttaccctagcaccaggtttctacctaagcccatagtggctctctctattgagatatctctttcattgctcttccagggaatagttgtttaagagagggcctccttcaataacaggcattctctaagtgcaagtgtgttttgctcatccattcacttctcacactaattcactcagtgtcctttagtctcagccttctaatccctcacctttatcttcattcacagccaagaatattctttcccactctccatcatgagagaatgtccacatgtccctatgacacaaatgcatatgacccctggcatgcacacaagatatactttgcctttctatttatttagatggatggttcatgttcccctctaaagccagctcctacatacacacattctcaaggctattagtaacaacatccctttttctcacctatattatccatttcctcatggctcttggatcagattcagcatactgacatccattgtttaaccaagccccagaaaatacaacaaaataacaataacctaactcatcaacagcaaaacgaacaaactaaaaacccttttattcctcccaccccagaaagtgcctcatagatctgcttccatgcacagcccagaaaaactggctatttttgtctctgtcctgactggttgtttagaagaggagggtttcctgtcagatttatacaatctggggaggactgacaccatcctactgaacctcttcactcccttcttccccagcctctaacccatcattccagtttcttctgaaaactaatccactttcacattctttaagtaaacttcattgggtcatgacctattatttctctaagtatcactagattcaatttgctcataatttgtttaagatttctggcatcaatgctcatgagagaaattaactttcttgtccttttttgcaatatgtgcagatttttgaggtcaatactgcatcaattgtgatgttttactttctctgttctctaggagacttgtattgagtttgagttgtctttcttttaatggcaggcagaacccacccagaccatgtggattacatttcttataactttcatacaaactctgttttcctaattattttttccacctaaatctttaaacttgttgctgaactcactctgacctttttactattttagggtctggacagctgacttccactgttactctcaaatcacatatatttgctcttccttccatgtttcttgactagacagtaaaagatatagctgccaggtccaccaggaagtctaatggctgacctgggtgagcctcattcagtgccacacacccttcttcatgcaaagtaggggagctgagaaactcatgctgacatggttggacttgtgagtctgtctgcagttgcagcaaggacttagagggctgtgcttttgtagtttacatgactgctgccttccccttggacactcagcacctcccagcaccatctacaccctgagctgatgctcctcacctgtgatgctggctacacacagttacaactttgtctcccagcatcgtaagcagtaggactgttggtcttctttctctgcgttattgttttttttttttcctagtggttacttcattaggacattaggataagaatagaaataagaaaatatcaactttaatctaccctctaaagaccatatgattgttattgtcaacttgtaggatttaaatgagatacaatgcacgcgcgtgtgtgcgtgtgtgtgtgtgtatgtgtaaatgtatttgcttagtacagtttccaaaacagtgccttttccaactcagaaatatggtatgtttcattgtttctttgggtcttctaatactatttgttttacttttgattcagacaggatggcataagtactttaatgctaatccacagctgtttcatacttttgtttctgttggaactggatgggatcattgattctagtcctaggaaggccttactgcttcctcactttatcattgtgttcagtcactttagcagcacagagttctgactgtgtgtcatctgttgtcttggatcttttaggaagatgagttgtgatttgcagaagcaaataattgggttttgccttcttcctttcaaatacaggcatccctgatacattctgtctgctctggccagcacctccactacaaatggtgctggccgtactcttacgatttccacagataaagaagggttttcaaagcttctctagcacatggtttctaggaaatagcttgtatgaatttgagacaggttccttccagtcttagtttttaagatgaattggagttaaactttgtcaattttttatttaaagaggtaacatacaatctttcttttttatataacttacaaattaatagtttccctatgttgaaacttccttctgtttccactgtccactctgcatggtcatgatctattttaattaatgcattgatactgtttttacatgcatggctgatgtaatttgctggcttcagacagtaatactgtgtgtgaggcttttagtgactggggtttcctttcagcacacatcatcctcatttagttttgcagctcaggcttccagaacaagttagaattgttgtcctgcttttagaccccctgttctagtttaagctgcagagagaatttcaattctgtaaaaaactgataactaatgcccttaaaaacatgtaggtgtggcattttcaggagatcttagactacatttcaatctctcagattttctctgtttaggtattctgtttgttaacaccatttatataggttttttttttaattaacaattcaccaaaatgttcaactatggtatgagataaggaattaagacgtggctattccatgttaccatcctcaagatctgtggggaaactcctcttctgctatcagagaaatttatgaatgaactttttttcttgatgagatatgccaaaactttatccattttcttatttttcttaaagaaacagtactttttatttggtaaaaagaaagagacacttgttattgcaaagggagtggaatttgtctgggagtctttatggtaatttctcatttttatatcacacctggtaaaagtagactgaaggctggctgtagggatgtttcctgtgacatgccctgctctgtttgatgagtggtgaactcatgtcaatgtgctccctgtttttaacttcttttctcagctttctaggcacagagccccataaatacagaaattacatatataaatacatacattcagtttgtattcaaattcttcaaattttaactatttactcaatctcttaatttctaaagccctttgcaaaaactgaaatttatgtctgagtataattagcgcattgttcccttatgtgtgaattatgcttttggtgtgaagtttgacagtagtaagtattggtgagctgcacacattggtattaaatatttctatgtgaccttccattgcccttggattttattctgattgcaattactagtataaaagtttcctttgtgtttgaactcatctagtatattccccctttgttttcaaactttatgctaattcctaggtgtggctttcactgatggcatgtaatttctgtattagcttttataactactggactacttggtggactcctggctctcctcggcactttaattatgcatctgtgcatggctttcttctggcatgaactccattcacagtgccgtcacatcctttataacattcttcctttccaaacagttaatgatcccagtcggggctctggatgtgaaattcctttcaaatgtacatgtgttttctgatttcccaagtctgctttaggccaccaccatggaagggaagcagcacacacagtgcatttggctcaaagaacagtttgttgtctgcactcaaagtaaagatttccaccaggtgctcccaaccaccccaaaacatcccagtttccatgcctaaactccagttacaggtgtggagccgttcctctgctgctgaacacctgcacaggtatgccaggaaatgctaaccagctttcaccagagcatggctctccaaccagtcaccatggttgcaccagggatgttttctcttctgccttcaagcccccagcatcccccatgccactgtcaccttttttggcttctcctggcatagtaccaatctaccttacttctgtctgctaacatatggtgctagaatcctgttccttaaatcctacccaggtatatgcatgtacccacacaaagaccatcacaaccatagtagcctaaattgtaactagatcagtggggtgaattttacttccagcctggagcaattttagttgtcacaactgggaaacaaacatctagtggcagaggccaggggtgctccaacactccatggtgcccagagcatctctaaatggagattatctgaccaaaatgtaaatagtcccaatgttgatcaactatgtatgagatgctctgagggagttgttgattttgtaaactgtgaaaacagcattctagtcaagtatttaaaagttttaattggttacagctgtatatttaagggtttaaaaataaaaataaacttgctgtgtgtgatagggcctgaaatttctgaaaataattggggaagttaaattcaattaaatctggaaaatcttaacattttcaagctaggagataggtacatagatgttcattatattggtttttagttttcttttctttttcattgtttttatcttttaaggtggaattctgctatgtagcccaaattggccttacaagcctgatctcctactttagcatcccaagtgctagaatggtgagtgtgtgccaccacactcagcttcttcttttttttttttttacttttttaatgtgaaatatataatatagagcttaaattgtttaattgattctttataataagacactgtttgatattctcaatgtatcttttaatgtggtagtttgaaagaaaatagccctcaaagcttggcactattaggaagtgtggccttgttgaagtgggtgtggtcttgttggaggaagtgtgacactgtgggggcaggcttgatgtctcatgtatgctcaagccataccagtgaaacacaccacttcctactgcctgtgtgtcaagatgtaggactctcggctacttctgcagcaccatgtctgcctacatggcatgccacgatgtgacaccatgatgataatggactaaacttctgaaaatagaagacaccccaattaaatgtttttcccttataagactctccaagagtttccatggtcatggcgtctcttcacagcaatagaaaccctaactaagtcaattactaatataaaaataaaataaatattatagaattataataattttattaaaggatttgagggcttgcatcagatactcaacagcaattgtttttccagtagctagataagcaggaaagagagagtaatgtgataaggggaagacattctataaggtacatcatgggacagtgacaagacctacctaaccagagcaactggggtattatattacatggtagaaatgggattagattatgaatactttagtcagcaaacagaaggattgccgtaaagcatcatgggcattataggttaaagagagattgattttgtggaagtattctgcatgagttttctagaggaaaactaccattcaaaaacaatcctattagatctaaatttaccactgttattatattaagtctgaatattcattgtttttttccatataactaattcttcctgagattctgaaaacaatgggagaaagtaatggacatgagatccagatgcaggggaaggactggccttggccacaagggtgtgaagtgaaggcaaaagtgtgtgtaagttggtctgcaggctttgaatagcaggaagagaagacaactaagtccgagggtgatggtacagttaagatggcagaggaagacctataaagggaaatgagatgataccaaaaagcaagcaacaaagagggtttgctgccagtttgaggcttttgctcatgaattcatagtgatctctacccatttgcttgagtgattccatctagtgacatgaagtgctcaaatggaagcatgaagaagagacagtgatgccctaagtcttctgagcttgatggacagaggagggagagggaaggtggctgtatttgctaaggactgtctgtattgaacaaaggaatctccttggaagagaagaaaataaaatgaaaagaacaagttaggaatcagtgaactggttgtctaaatcacatgaaacaactgtccttgtgaatgactcgaacagttgaaagaagacagaaggtcatggtcaatagcaggctctctgaaattgatactttagtggtgcactcactggagatgaaaacgcccacaatgagagcccaggacatgctgctgttgccttacagtaaagttcctgtcatcaaggtgggttgtcacaggaaaccctgcattgtcctgatgagctgaccctctgtctcctgcctaacggtccctttattaaaaggggaagagtgttttgctgggcaagtatggtgacactcatatggcacgtcttatttactgtaggacgctcaagttaggtgggacaagagggtcctaaggagcaagcagatggcaggggtcctcctgcagcttaagagcataaaggagatacaaggagagctggcattaccctgtgttggtgccttaagaataaccctgggaaattttcacatattgcactcctcacacatcggagaaaagttcacaatctagagtcagtcagacacgtttgaatttgtcatatcaattatactaataccatgaagagcctcatggctttcagaaagggttacccaacagtagctgcaagccagacctaacctccagctggatgaggatagagtccttttgtcactcagtggctgtccaataagagaaaggtcagtctgcccctgctaaattatggacaacataagtagccttctgccttcttggggctactcaggacggattcagccacacatgaatcagaagtgcccacttagccacggggatataaacattaaaacatcaataattgctgatctctcccatacttttttactactaggttccaatttcacctctagagatgatcaaagggaaagcatgatgaacttgaagtgcactgcacttcagggatgtccctgtgtttcatccatttatcaaacaagggtttattagcatgcactgtgatagagactacagatggttctccacctcgagagattgcaggttggtgaagatggacagagacctggtcaatattgagacttaattacttagtaagttatacaccacatgttttgcttggttgtagaaataaacacacatctacagacatatctcctgcctcgattgttggtattcagaacgctcactgcctaatcaagaagatctgcttggaagaattgcccttttgctgactctttcatgcagagcagaagtctcaaggagagacctggaaataaattacacatggagcatcagaatcatgaatgcccattcgtctgagaaaccacaagaagttgagaataactggagacagtgtcttgcaggggaagcagtaacaggcagaggaggatacatcagaatgagtgttcattgggtttcagaattaaatcctcactttggagagcacagcaagttacttatgtttcttttttagcaggggaagaaaatgactgtgctgtacccaaatgggcccattctctagaaatgtggaaattggctttgtatcaggcaaggttggatgccagaagtgcaattagctccatgcaatgatccagatgattggcaatgaggataaatcaaaatcaaaggataggacaaatactgaaaatcaatggggttttagtggatgcgtggtggtagaagctaatagaagtgggagcacccagagtgacttccatctgggttctgtgcaccaggtgagtgaggctggcaccatctgccatcacagtagaacaggaaggggtttgcagcaggggacatagtgcagttttgcacttcccagctgtaggcaggtttagttaaacattaacattgaacatatcagtgagactatgaaaattaaaaacttttgctttctcaaaaattctgtgaagaagatgaaaagataggctgcactcagaggaaaaaaattcccaagcccatatccagttaagcccatatcccatattctgtgtctaaggtttatcaagagctgtcaagagttagcaagcaaacaacctaattagaaactgggaaaatttttcatcaaaaaccacaagctaacatatcacccaggaagagacacgacaagtaggcatgtggaaattggttcaatgttatggaccataggaaaatgaaaattaacccgaagtatggcatcaccagatgtccactaggctgggaaaaggcaatgcaaacagcaagtgctggcaagaatgcagagaaacaagtgcaggtacggcctcagtgtggatgctgctctaggagacaggaagacaggtccacatctaaggctagttcctttacagaacagaagtcacaggccctgttcaaagtgatgaagaagcggcaggttacaaagcttcagccagctgaggtttggagcaaccacagagggaagcagaagagggcatttagtggaaacagaaaaatgtcaacatttcttaccctcttcatactgcctacaacgctgccctgcaggattctgcaccatgataaaaatgttccatgtctgtgctgtccactctcagagccctcatccgcctgtgctacgggcagtggaagtgtggtgaatgtcacaaaggaagtgacgtttatcacatgtgattttaacttagatagccatatgttgttagcagattgtctatcacaaagtaaagataataggtgtacatagtagacttttagttttcttttttattaatttattctttaagatttaaaaaactattttatgtgtatgagtgttttcgacatatggaggtatgtgttccacatgcatgccaggtgcccagaagaggatgttggattccctggaactggagttacagatagttgtgagccatgtggatactgagaaccaaacccaggtcttttgcaagagcagcaacaactcttaagagctgaaccattgctccaacacctattagtttatttcttaatcagcatgcaaagtattagatttcagccgggcagtggtggtgcactcctataatcccagcacttgggaggtagaggcaggcggatctctgtgagtttgaagccagcctggtctccagagcaagttccaggacagttggaactgttgcacagagaaaccctgtctcaaaaacaaaacaaaacagaagcaaagtattagatttcattatgacatttccaaacaaaatctgagttgattctcctcctgtgtctctcctgtctccctgaacacccttgaatcatccctccaagttcctttccactttcaagtcacaggtgtccttttgccttctgcctttcaacaccttccccacccccttttagtttcctttcttgtttcttagcctttacctacactctcacccatttacatacatatatgcattaaaagttaggatccatatgtgagagagaccatttgtctttctgagtctgtttcctcattaaatatgatactttgcaattctatccattttcctttaaatttcataatcttactcttatctattgtgtacatgtgtacatgcagcattttcattatctatttatctgttgatggacatctgggctgtccttactattgtgaatagggaaacaataagtgcagatatgaaagtgtctctgtgataagatatggaagggctaaacatctccaaacacaatatggtcctttcgggttgctagtaaaagcctaggtctaggatctaagcacacaatcttcttccccatgctactcataattcagtaattcattataaaatccttggcccttaaatcacaaatagcaagcattctcattcttgaactattgcttctaattttcaaacattttttggtcaggcttatatcacaaacaatctggcagaacagtaacagtgaagattagccttaggggctgaacattctcagagatttctaagaccagaatggacttcagaaggtatgtggcctgcctgttcttgtggcacagctaatgtgcacaggctaatgacagggcaggcttcaaacccagcctcatcctgtaccatcttccccagagttcttgggctcaaacacactagcattcagcatgacatttctgaagcacccagaccttcctgactttgagacccttaaaaaagaacatcagcaattaagccaaaatgattaaatgaaagagttgtgaatggttagcttcaactatcaacttgatgcaaactaggattacatggtaagagacaatgagtctatggattatggctggccggcagacttctctttgagggagtttcttggatgagttcactaaagtgggaagacctaccctgaatgccgattttaccatttcctgggcaaggctctggagtgtataaaaatagacatagctagctgagtacctaacaagtgagcaaacaaggacccaaatatttattttctctctactcttgactgaggatatgatgctctaagttcctgccttgactttcccacaactgaggactataacctagatgtatacaccaagtaaaccctttcttccttaagttgctctttgctagagtattttatcacagcaacagaaatgaaaccagaacagaagtgaacaaatgaagcctatgcttagtttttgttataatgtaggtgttatctagcctctgaaggcttagatctagcacgtcggtactatggggaggtgctggaccctttgcagggtaagaactagaggtaagaagttatatcatacaaggcaggcccttgaaggggaatgtgggatcccgggttttgtttggttttcttgtttgtttgtttgttttctgtttctcagtgctccctggctcatgaagtagtggctttccttcagtacacatcctaccactgtgtgctgttttgccagaatttcagagccattggaactagctacctgccctagaacctccaaagccatggaccaaatctctcctctctctctctctctctctctctctctctctctctctctctctctcgattaagacagtctatgaattagcctaatctggcctggaaatcagtatacaccacagtcagaccctgaattcacaatcatcctgcatcatcagacatgtgccatcatgcagaacattagcctttcttgtttaggcttattaccagaggcatctcttaaagtgacacagcccttaaaacaacagcactctatcatcaggtaggaccatcctacctgagaccaacttcagtattcatactcaactttctgcaaatccctgtctaatcactttaggtccttaccagttgtgtaaccataaagaatataatatactatatagtatataataataataataatatgtaacccagatagtctggatggcctaaaacttgcctgaggattaggaaagcaaagtcagccacaagccatagaagccaggcacacacctttaatcccagcagccagaagctaggaggtggtggtacacacctttaatcctaggactcaggattaagagatagacagatccctctgagttgaaggccacccagatctacacaggagcaaattagtctaaaagagaattatagctcacaccactaatctcagcattagagaagtatatttgacagaaacaaagtctcagagaggcattcattctccagccactatgagaagaggttacagtatgaggcttggtgagagctcgtggagaaaggatcagcccattcagctggaggtagaggtaagaagtaagtggccagctgctttacttttctgatattcagtttgaagcttgaaccccaatatcaatctctgggtcttttatttattcatgttacactcatcagatgacacgtgcgtttttccctctagcacagtgattctcaacctgtaggtcaccacctctttggtggtcagaatggccattggaaaacacagatatttatattgctattcataacagtagcaaaaattatagttatgaagtagaattaaaaacaattttatggttgggggccaccacaacatgaggaactgtattaaaggaaggtgagaacaactactctagcacattttcaccagaaacttaaagccaccggtgaaagctgctatgctggcatactccagaagattctcttccactcagcaattgttgactaaactgttgactaaagaagttcctggggctgcatcttccaatcttggaaatggagtctgtgagggttgcaaattgtgtgtccacgtattatcttcccagagatgctcctcagagtgcctgaagcacgtggccttttccctgtaattggagaacttggctgatgcccctccagtgtttctctgaaggggaagagcagcttagtggagcctttcaaggatagcttgcacattaaaaattgatatagcactttaaagtttaaacaaaatgcttagtgtttactggtattgctcattttcataggtttaaaaagttgggagaagctttagcactggggaagtaccaaaaccactttaatatttaaggtatatgttcctaaaaagtcaattcagatgctttggcttttgtctattctatataatggttcttcctcagcctggagacaatatttaagttgggaagactgcctgcactcccttccggtagccatgggaattggatgaatcccagtctgctgcttctacactagccattcccagcctttatctctgcacaaccttcggggttgccattaactgtaaatgatagcataaaaatccaattattttaaaaattcatgcacattaaacagagttgtttgtgatggtggaataaaatgtgcacagcaaaaacaaaattgaccaaatcatcaaagtaagggcatataatagacaagagagaggaaggagacggtgtgagagaaggatgaaaacaacctgccattaactatcctagctagagtcaagtgagcattgcaagaatagaacaccaattgtgaactaaaatgtaatgtggctaactacatgagttacacacaggttcagccttgttgcagtctgctggcaccttctggttgtcaaatacaagggcacagaatgctggaccctcagttccattctattcgaccagcagttaaggctccaaccattaggtagcaaagacccacactgactcagaacaaagaagactgtttcagtgactatcacccatgccacagaagtgacagagtctggagtaactagaggggctctgattggttaagctgaggttatagtcctgtccctgatattctaatcaaaaatcaagcagatgaattcagcaacattttttccagtgtactgaagggtaggcactgtgcatcgagacacccctgccctccttgcagttcagttacagtctagtggggacttggatataaacagctagtggtgagagctgtgaagtaagacaagactatgtgagggcagagataagactctgggtgactactgcattcgtgataactgggacacatggtttagaggagccaccagctggccaaggacttgtaacaatggaggagcagaccatcaaggaaactgcactgccgatgaatggtggtggcagagtcaggatcaacaatgtgtttggcaggtgaaggaaccagagcctgcagcaggagagaagaagaaccacgtacttgaaatgatctatcaggctcatcaaggagaaaattttaaaaatggagaatactttccaacgacatcattccaggttcccacacaaaggcttctgaatgaataagaaggtcaggagatctggctcatacataaaattgcatatacttgctcttagcatttgacatgcctttctagaaacattatgtctatatcacttagtatcctttctgagaaaaaagaaacaggagagggtttaaaaacagctatttgtaaatgacctgataaggaaagctaacagtaagtttgggtcactggagctatgacttagtggcagtgcacttgacaggcatgaacgtggctctgggttcaatccccagtgagggagaattagggaaatagctagatagaaaaaggaaaaactgaagtccctaagatgatacttattctcagaggacattcagggaagaaagaggggaaggcatggggtgggtatctaaacaggaccaataggggaaagagaagggtctagaggcccacccactcaagccagagtcagctgagggtcccttccattccaaagggatagttttttactttagctttctctgtggcttggtcttccatctttcccagactttcaattctttgtccttcccagagactgagctcaggattccctagatgccctccagcacccctaccacaccagtgcttgctgtaagaagaaagaaagagaaattagaaactctctgggacttggcttgcctagtagttaaacatgtctgatttaaaccagatgtatagctttaaaaggccatcaggctcccatcttacttgagatacttgtccatcaactgaacacatccaactgtagcttaccagtttgattcctattaaaatgcaaacatccctggaaatgtggggtttcagatacttattcaattttcctagaagacctgggagaagctggcatgtcaaactgcagacctgcctaggactagccctcctctccctgtcacccacctggggtccggtttcctcccacaccaaactccttcctagtcccccagtttcttatttggcatccttcttgccacactctgacctgagcctggctatgacaaccatgttaggtttcttccagaggtgcagctcgattttgtacatttacacacattgcttcagttaacaacgtgatctcaccaaactgcctgccccctctctctacaaagacaattcaataccttaagtttaaacctcgcttttcctataaatcttccacaattcctccacacatacatttcttcctaatatgaagccaaaatgttccctaaagtactatttagtcctgccagcctcacagtaccttcagtgcccacactctcatgtgtcctgcttctgcctttaggcatgtcttagttagggttagtattgctgtgatgaaatgccatgaagaaaagcaacctgtggaggaaatggtttatttcactcacagttccatatcatagtctatcatcaaaatcagtgagggcaggaacctggaggcaggacctgatgcaggggccacggagggctgctgcttactggcttgctcctcatggcttgctcagcctgcttttttatagaacccaggaccgccagcccaatggacggggcactcctatttcaatcaccaattaagaaaatgtcctataggcttgcctgaagcccaattttatggaggcattttctcaattgagaaattaagaaaatagagtcctttctttgcttactttggcttgggtcatgttgatatagaactagccagcacaggccataagtcagcagcagagctcagcctgcatctctttgccgcattatgctgcatcctgcctaggttggtcctggaaacctgactagggcaaggagggaatggagaaaagacagacacacttgcacatataccgaaaggtaggatgggtggtgctcaccctgaggcagggcacctactgcatgccagatcctcagcacatttattttatacatgtgaattgaggagacaagtttattgtatacagccgaataaagaggcagctgggggcaggaggcaggtgtagctgatctggtaggaggtgtccttagggaggagtcttcaactgccatcaacccagaggagggaattgtggttgatagctttagcatacactgtcaacattcacatttagactagaggaagcctttgtcatctccatgggtctgagatattgggatccttgacatggctaagctcatgccagcaacacacattcactcagggtttcctctgatctccatgggacagggtgatcatcttctcataatattttagattccatggctcatgttagctacttttttttttttctacttcccaggatggcctacctcggggtagcaccacccatagtgaatcaggcccttgacatcaatcattaatcaagaaacgccccctacaggacaatctgaaggaggcatttttttccattgagtgtccctcttcccatatcaacttgacaaaatactaatcaaaacacttccattttactagtctcaaatttatgttaaagacattaattagctaaaaacatattaatatgtttaaaaaatgacaaaaacttgttaatctgaaaactgtcctagtctaggttctgagtgtagctcagtgagaggggagctattcttgctgatttcacacccaaattaagcacttatattggttttcatatataaactatctcaaggtaaccagatgattgataagagagcatttcccttcgtattaaacagcaatcaattttgtttttaaaaaaggaatcaacataacacttcataaattcgaatgatttaaaaagatttagacaaataaaatcaacggcagctaccaaaacaaaagagaaccaagcatcctacccctttatatacagactcaccaccacctatgaaattatacttggcaaatacagcttaacccaaatctggttaatcttacaggattgataaactgtagatctccttaacaatttacagagaatgtggagaacagaatattatgttacatttgctgaaaagaaaaacttaactagccagagatgcttcttatttttgtcttactcctgaatgataaatactaaacacattgaatgctgatcatgtgcctcagtcagcatagtggaactgaacaagtgtccctccaatggcacgggtatctccttagtgcccttgggctaagtaaaggtacaatccaaagtgtgattactaaagagaaaccagctcaagtggaaccagagaggccacggtagctttgccatagcactcacctgaacctgccaggagacactactaagccttgcccaaagacctggaaacccattcttgattctccagccagactactcagctccaaacagcatctcagttcccaatggggatgatgatgactggtacacgttagggactcatctcctccagcgtgaagccacaccatttaaagctagtgtctcaaggtcccctgcaatgtgttgactgtcccatctactaagcaggaaaacactatctgaactgagcagatgattgtttttatgtctgtaaagttcataattatcagttttctactataaaggaaaaaataaggtttttttctctaagaaaaaatatccaacaaaataaaattcactaacagatgaaaatatatatcttccgtaaataagtcttgaggagcagctgagagcagctgcagcagccttcaccaccctggctcatccactccaatccatccaccataactgatttaatatgagcgtataattagtactgttgattactatctggtgccagatatcccaaatgccccaccttcatgctaattaatcttgaaaactttccaagctttcccctgccctgcctgactccgtttcctgcatcggtgcacacatagcattttattcaaacaaatcgaacaacagcagcatcactaggtcttgcacacagttggtactcagtaaatgtttgtttattcaaatcactgctccttcatcacagtgattctcattagaattgaaaacccacagccaagattgaggcttgggtcactaactggaaattgactttagggcaacttgtgttcaaattgccagtgaaactaatctttagaaaaaccaaggagtcatcatggataattttctggtagaccttgagacataaaactctgcaccattaagggtgtatccatacatcactgatttgaatgcaagtagtggaaaccaatgagaaaccaggagagagactattaaaacttagcagaaggactgacacgcttaagtgttttctaatgttttacacaaggctcattttatagaaatatttgtgaggtttatttggtaaacaatggtgcgaatttgaccttcaacaaagatgtagtacacaatcctttgcaatcctcctcattctgatgtgccttttaaggaattctgactcttaataaacacagcattctgtattctaagaacccccttcccaaaatagaaggcttcttccaggagcctttgaaaacaagtgactcaaagctgtcactacttggcactaaagggactgaggtgctggcaaacagcaagaatggcacgaggatcagaagaagcaaagtccaaatgtcagtttgagacatcatccatcactaccacctaagcaagtcttacagcttgtattcccacatacaactctccaagaactctaaacctagttcttcaccaagccacattcttctctgctttatttgcaacatcccagatgagttttgtcccctccctcaatgccgctgctccacatttttcccataatgagatgatacaatctcaaaactctgaactcaaggccgatcgttatttcctaaaacaattacttatcaaatgtctacaaaagaacatatattttaatttaaagattatctggtattcgttgaaaaatttaattgtatacttctgtatgcaaaagtaaacaaaaacttaaagtcaacaacaacatagatattgcaaaattacaataaattgacatttgtaagtactatatataggtatttatgctactatatgtttatatgatatatatactatgtatcaggtaactactataatccagtacaataaatagggcctatgagtaggtaattcacttaaaaggaaaaattggtgtgtaatatatgtcttagtcaagaccaaggcaactcttataaaggaaagtatttaattagggattgcttacaagttcagagattcaattcattatcagtatggtgggtagcatggaggcacacaggcagacttggtgctggagacgtagctcagatccacaggcagcaggaaagagagagacagtgggcctggcttgagcatttgaaacctcacaacccaccccagtgatacacttcctccaacaaggtcatacctactccaactaggccatacctcctgatagtgccactaccttaaagcattaaaatttatgagcctatggaagccattcatattcaaactaacacagtaagtatattacaaaatgtactggttagtttttatctacttaatgtaagttagatatgagagaaagaagagagggggcaggcacacacagagagagacaaagacacagagagatttgttagaatgacttacagggtgttgtacagctaatccaataatggcttcctatgaatggacgttccaataatcccatagtttctcaggcttccaggctggatacctcagttggttttcagtctatgctggaagcaggctccaatgccagggaagtagtggacttgctagcatggcaagagcatacaggcaaagagcaaaagctttcttcttccatttccttataatggcttccagcaaaaggcatggcttgggttagaggtgggttttcccagttcaaaagatccagattagaggcgtgtcttcctacctcaaagatccagattagaagtagatcatcccaccccaaattcaccaaaaatccatcacagtttgatctctccatttggggatttgagttaatcccagatgtagtcaagttgacaaccaagaatagccatcacactagtcttgaggtatttccttgatgtacaattggtgtgagagggcctggctctctcaagacagggttgcctctgggaaggtggtcttgggttgtgtgaaaatgcaagctaagtgaaccaaggagggcaagccagtaagcagtgttcctccatggtctcttcagttctgtctccatgttcctgcttgagatcctgtcctgtcttccctgaatgatggagtctaacctgtaagtctaagaatcctttttatccccaagttacttttggtcatagtgtttatcacagcagtagaaataaaactgatacattatcttaccagtggagagataggggaagacagtcaacatcactttctgttctccagaggtactctcacatgtaacataatggggccccagaccttagcataactgaccccatgatggaagtgccattcagactgtgaaactcagtagacagtactaccagtcaaaatgaagacaaagacctaatccatcaaagtccatatagttctgggaaagtctctaaatgcactaacctagtattatggtttctgtagttccatatctaactactgttcttgtttactgaaatatatcaacccaggatatggtgtttgtgcttgtggctcagtgctacactgggatcccaaacacccagggtagcctcaggatggctaataaagactttctattggcttaaacccatgcccaagcagtcttctcttgtggctaccccacaacatgcaggcaagaagaaaatggacaactaaatgactgaattgaacttgattgaatctaattaaagacaaccagttataaaagttatcagtggtgggaggaatatatagcaagaaaattagagttattagttagatggtaagtgatatttgtaaattattatcagttttcttaactagagctatgatcaaatagatggaagaaatgttacatgctaaacgaggactaatgtgccatggtgtctgtaactaccagatatttcagaaacaaaaatatatatgaagagaatacttatactttaaaagatgcacagttgtatttcctatcagaaatagaataaccattccaaactgctcattattgatagacataattctattattgaattgagtgataccttatcaaccaacatgcatgacagtagaagtccatgagatgagatggtctttaaaaggaagataagatgattccacctactctgtaggagcaagaagagtgtgagtggaggttacacatgcatgtgcatgcacacacgtgcatatgtgtgtcaagatagtatacaatctgaaagtatttttctgaaagaaattatcaatatatttttctaattattcctaagttgtttttttttaaaaaaaaaaaaaaaagttgggcctgtaagataaaggctcttgtcccgaggtctaacagattaacctgagcttaattcccagggcccccaagctggaaggaaaggaccaactcctgcaggttatcctctgagctctagacacatgccatggcatgtgcatgtgagtgctccccctcccccctctctctctcacacacacacatacattataaaaaacaaacagactgaataaattagtaagtgtaatttttacttttactggagggctggagagtggctaagagcacttttgtcaacaaattagtcatccattactgagtggaagagaatcttctggagtgtgccaacatcgtaacttttaccggtggatttaggttgttggtgaaaatgtgctagagcagaggtctcaacctgcctaatgctgtgacccaactcgttaacacagttcttcatgttgtggtcacccccaagcacaaaatcatttctgttgctattttataactgtaattttgctactgttgtgaatcgtaatgtaatatttttggagatagaggtttgtcaaaggggccatgacccacaggatgagaaccaatgcactgccacgtgagctggaatttatgggtccattcagtcatctcagcagaagctacaaatacaggaggcatcacaccagcagaagcattgccagctatcataaaatggggacagaaatgagaagcaatgaagacggtggcacttccaggttctaggtcaatagtgatagctagctgtgaacatacattatcctacagaaaaaggttggtggtgctgccattgcctccttgggcccagggtcatggggtcagaggtagaggccactgccctggtggtctgggaagacaagatcactcctgtagcctgggatgaaggagcttgaggctttataatccagtggaatgttccagtgggagttaagaattgcttaaaacctttgcccatttattccttccagtttctcccttgtaaagtgagccagtctatcatctacctgttccctcacagtactttgcaaactgaaaacttcatgtgatttaagaggttagtagccaggcagaaagtcagcttctggatgaatcacagagagtctcaggcatacctcatttatacaatttaatatacaacatttacatgagattctgctgctggatgggttcagacttggatttggaacattgggatggaattaatgtatttttcatgcttatgatggcctaccatttaaagagcatgaactttgagtaactgaagcaatgggcatttgctggccagtcccttctcactctgttgttgcctttggcaagaaagcccactgtcagtgacagcaatgactttggtcatacaacacagagaaattacctctctttattcagttagtttatctgaggtttagaatcatcagattccaagtcttactattttctattttctcaagacctacttttcctttaaattatcacacttctttaatgtgaatcctgcctacttttagcaccatactaacacaggaactcaaactctcagctctctttacctctggaaaatccagatctatgcatgtctgggtcctctacctactatagaaatagaatgacttcctgaaaaggctgagaatatcaacacttgcctttatttgccctaatctctatttaccttatctgtacagctcctttagataccactaaagacaaccaatctcaaatacacacacacacacacacacacacacacacacacacacacacacacaccaaatgtacacactacaccatacatatgtgtgtacatgtgtgtgttatatgtgtatacatgtttgcacaactctaggtaaatagaaaacaatatgattcccatggcttttgaaaaatccttggaaatttttgtatcagcaattttaagtgagggtagcttatgggtttccttcttgtgctattttggtccagttttcatactaaaataacagatacatttctttgctctcggtggcatgtgttggtggtatgagcatcaaatctggctttgctatagaggcttgttagactttttgacaggtggcatggagatttctgacacagatgaaactgcagactgactacccacactggctttcacttcactctgttttctcactatccccataactggttatgatttattccctccaaaactcatgttgaaattgaattactgttagaagatgctaagcggtatgagcaatctgggcatgacgatggcacatgtttgtcatcccaacaaaggttcaggaagccgaggaaggaggttgttgatggcacgcttcttttgtaataactttcccttttagtgttcttctaacttttccttgaaagcatcgcttacagaatgtgtagctttcctaactcatgtgtcctgctactgagatggtttgaaaataaccgaagttttcagccatttgcatatttaaaatagtatttgaggtactggaaaaaatagttcagcggttaagagtaaacactgttcttgcagaggacccaaattcaatcccgggtttcctcaatcaagaagctcacaactgactataactccagctccagtggatccagtaaccacttctgtccccctctggttttgcagtcacatgcaatactcccccaccccacacatacgcaaatacaaataaattttcaatcagtgtttcatagtagaagagatgggtatatctgacagtctacagaggatttctacttaaattaatctcttggttttgagttgttcaatattgtggtgggaagaatgtagagagaaaacatgagattatatttgtacattgtatggagaataagaatacttctgagagcttacacacagggaaagcaaatgaggagactcctatgatgtgtaactacttgcagagaactggccccagaatgcaattattgacagcacttaaccacctcatactattggctgtaatatggatcttgccagcaaaagcaaacatccagtttctggggaggtggcacccatggtccacctctttatctccaagatgagttgtatggcaatgactctgatattgagatggcttggaccattcgagcgatgcagcatgctaacgtctgttacaaactgacttcatcagttgacccagttcctgaaactcaccaaagtagatgaccgaatctactctgagttccatgaaaattttgagaagctcagggtaggtgtattggagccagaataactcaaatcagaatcagctaaagagaagtggaggccattctgtttaaaatttgaagggaccatagaagactacaactatggtattttgttgcaactggattgttcccagggctacaatgaggagaactccatctttgcatcctggattcaattttttgcaattgaattgctcagaactgagaagactataacaaagcagtttccatcagtgttcaggacaaaggagagaaaagagctgacaataaagaagacaaaggtgagaatgaactcatagtagaggagaaaaagaggaaggagtcagcagaggtgaaaagtagaaaactaaccaggaggagaagaagaaagccaagaaacatgtgactcatctgaaccctcaactatccagtgctacttgcacagtcccctttggtttgcccttgggcaaatggagaactcagaaagacatctttctagatactaagagaagctattctgggcataatagcttaaacacagtggagtataaatttattgttgcttgataccctgttttttggctataactgttgttgaagtaagacatcttgtaaataaattccttttggtttgtactatttatgactgactttacaaagtatttgcatttatttgacacttcaaaaatttcaagtatataatcttatcaccgtgtcaaatataaaactgtctgtcaattcttctcactgttctcagtaatgaagttctcttaacttgttaacttgtacctgttgtggggattagaagtgtgtatatgagaattgatagactcagccaggcctcatggttcatacctgtaatttccgacatctggtatctcaggctgaagtaagaaaactgcatgactttgaggccagcttgagctgtagagtgagagagtttgcctcaaaaataaatagtttaaaacagaaaaaaaactgttgtgatatttggtttatgatctaacagataaagcttgcctgaggatcagaacgcagagctaaccacattagttagccatagaggccaggcagtggtggcacacacccttaatcccagcactcaggagacaaacagacagatctctgttagtttaagtccaccctggtttacacaaaattgatccagtctaagagagaaacagctcacacaaaggtgaccccatcacttgggatcagaggcttttaatcccaggactagggaggtggagatggagtgatatgattaggtggagagaggaatataagccgggaggagacaggaatacagtgcagtcagtgtgaggcagtctgaggatgcagtctgaggaaacagtctgaggacaagatcacctctttggtccgagcattggtagaggtaagaactctctactgtctggccattctgcttctctgatcttcagttttcacccctatatctgattctgggtttttattactaataccaattagaattcatgcaacaaaactcatgctattttctgataatggcatgttcaaaaatattttatctttaaaagctatataaacttctggctacatttaatattattgttgcatttttctttaaaagagaatcctaaagagttttaggtgataaacactgagtatttattcattttcaaagttatgtttgagtgtgagtccatttattttcttatatgatcacacaagtatgttttgtctatgctcccgaagaaattgaggaagagagaagggaggaaggaaggagagaggcaaggaaaagagaggagtgtctacaatctcacctaattagagaaatacatttgcaaagtcatttcacctgtcacagaggtcacacctggccccacaagggtcccatgaccactggaaagccagtacctcagactctcaagtttctggctgagcccaactcattcattggctcctgctccctctgctggttccacagctcagtggccaacctctaacactacttgacactcaggaggcagcaaagtcaaactgcgccccaaccctccatgctgataaaacttgcttgtcacatagtcagtagcagaccagctatggaatcagtcatcccactatgtcgcccatccttcacaagtaccaagttccctagatattggtgacattcctcattgtgagctggcttgtttcaaagtgcatagcctattataacataacatgcacataattatagaaattctgacacagttatctgaaagggttttgttttattttgtttttttttcttctttctttctttcttttttttttccgagacagggtttctctgtgtagctttggagcctatcctggcactcgccctggagaccaggctggcctcaaatgcacagagatctgcctgcctctgcctccccagtgctgggattaaaggcatgcgccaccaacacctggcttgttttgttttttcaagacaagggtttctctgtgtagccttggcagtcctggaactcactttgtagcctcaaactcacagagatccacttacctctgcctcccgaatgctgggattaaaggtgtgcaccaccactgcccagctgaaaggtttttatgaataagtctgctaccaaccccgatagtaacaatacacaaaacaaaacaaaaataaatcgccccaaaacatacagagcaaaacaggctgaacatcaaatagtaccactgcccagcttcctttctatgaaggtctagaaccagctttaccactgtaccctgacagaagcaaatcagtggtggcctggggcaggaaggtgccttgtgggtaatagaaatgctatggatcttgaccgtaatgctagttgcactggcaaacacattcatcaaaagtcaccacaccattttacataaattgtgcctcaataaaactgctgttgatagaaaaaaatctgttagccagacactaaatcctaacctgctttttaaaatctgaacatacctgtacacattttatgtgtctgggtgctttacctgcatgcatgcatggatcaaatgcatgcctaggcctgcagaggccagaacagagcataaaacccctgcaactggagttacagaaggttatgagcagtcatctgggtgttgggaagcccactcaggtcctctgcaagagcagcaagtgctcttaaacactgagccatccctccaaaccctgaacatatccctcgaaaaagaaatactagtagatagctgtcttatttcagtatttagctacaaacttcaatttttccagaacaaaataacagcttagacccaaaaggagggctgggaggagagtcattgctttcctaggctctcacaaaacagcccgttctacagatactacaccaatgggtgagataaaagagcattgtgggcggagagatgtataggaagctcttcctctccaagtcacatatctgtacatttgtccacaatgagctgggggtctgactgcctatggcaaaggcccaggcaagagtaactgaatgtatcctctgtgccttgccctaacaaggtgggcaccctaggtagggagctctgctgctggtcaggactgaaaccaagagcttttgttcccctttgatctggaggacacacctttggtatagccagtgctgcagtgtgagccagctgcagctgccaccttgtagaaacaccccaccatgatctatgctgcagggtaccttgtgtggaaatgacagcctacatggccagaaaacaactatttatatgacatttaaattaggctagcaatattttaaaatgcacaggagtattgggtaggctatatattgttttatatagggaattggtacagccatggattatggtatatgcataggtcttaaagccaatcccttcagatactgatggtactatggtcccaatatccccaagagatatactttgtttccaaaattatttgacttatgatacatttgggaagcatcccctgggacataggcaatctagaacattgggttacctgagtcagatgagaattaagaacatggcatctaagaatggactcacaagctgatatgtaaactaagaacacccagctctacagagcacttactgttccctacgcattgtaatgacctcttcaattcatttaattattagtgaggtgcaataatactttaccttcattttatgcatgagaaaactaaggcagaaagtaatgcaatagtttgaccaagattaatgaagagacaaagccagaaagcaaacctggctttttatctccagcactcaagcttccaggagcactgcggggcctttacacactgtgggaagaaattaatgcatgtggcctgaatactcatgccccaaccctgccaaattcatatgcttggatccttcccccagaggtgtaaggtgtgggggagactagattgtggggatgaagttttcatgagtgggattagtgtctataagtggcctcagccatgtaaggcacgtcttccactatatgaggacagagcaggaaggcaccatttctcagtgaaaagggggccttcaccagttccttgacttggatttttagcctccagaacccagagaaataaatagtatgtttatgatcattaaatagactcatcaacccaaattgattaaaccctgcatgtcaaaccctcattcagagtgggtctacggatcagccagatcagcatcacctgggagttcagtgagactgtggagtccctcccaatcctgcagctttcaaaccggtattttagcaagatcttcaggtggtccttcaatggtggagaacaggactccaaaagacaaaatcataagtttatcttgctttgctttggtttaaatcccacactgctttgatatttggtgacagttgtggactctgagcacaaaaacgtgcgtgggattttgaagatttcacagatttgtctttaaaaccctttctgtagaagttttaaggtgttgggagccagcctttagggttctcatgaattcttacatttaatctcttatacaaagtattggtaaacttgagaaagttaagcaagctgccctagtcatagcacgaaagtgacagagaatcaacctagacattctgctgccagggtccaagctgttaggggtgacccagctacaggaaccctgatgtgcatcctggtggatctgtctctgagaagatcatctcctgtgcttacagcatatttttacaataccctgatgtgacagtatgtaagggtcactttctacagggaaagtggcccaggtggagcctaccagtctatgtaatgagaaatgtccatttcagatgacccacatatcttcttggtttactgccaatctgcacactttcaagtagtgtgccaacccagttctgtcatctgtcatattagtctacttaaaccatgtgggcaagaagattttactctgtggaccacgcgatgcactggtgatagcttcatgattctctgtattgaaagggagccaggtgagggccatgactgatgaggcctgcctgccccccagtggcacgggggagcacagtagtagggatgcatcactgtttagttctcttggatttctaatccttcatctaacatgcctgagaaatataacttctgatgcataatcatgattcctactggataagaaacacccttacttaaggacaggcaaactatctgactcatggaggattgtgaaaaagtgtatacaacttgaacacttgaacacttgtatttatttattcctgtgtgtgtgtgtatgtgtgtgtgtgtgtgtgttggtttgttctcttgacagtctaacgtatcacatgcttatcttgaactactgatcctcctgactatctcccaaatgctgagactacaggtatatatgccaccacgctcagctaacattgttatttccaattcaagcatttcatatatatgtacaaaccaatttcagattttatctttggattctgtttttggacgccaagggcaattcttctttaagacactcggtagcataaagtctaggttcagggtatgtcatttgcttctggctccagtctattggagcaccgtatgggggtttgttttcatactactgcctttaaaaatcacagtcttctaaagaaatataatagtaacatctttatagatttagtttgctggtttaaaaaatgatttttccagctgggtctagtggtacaggtctgtaattctagctgttttagaggctaaaacaggaagactgcaagtttgaggctagcctggactacaaagtaagctcaagactagccaggtcaatttattcttgaaacaaaaggtaaaaggggagaatgtggaatattcctttatactgtgtgaatatatgtcacttgtcactatggttggtttaataaagaggctaactggccaatagctgaacagatagcggtgaggggggacttgcagaccaaaagagagcacaaagaaggggaggagtctcaaggtcatgaggaaattcagagaaattaagatgaacttgctgtgttaaaaaagaaggtactgtcacatggcagagtgtagataagaaatctgggttaatttaaaatgtaagagtttgctagtaacaagtctgagctattggctgagtgtttataactaacattaagtctctatatgtgatcatttgggaactgcctacagtggaaggttaaggttataaactagcggtgaagtgctttcttagcatgtacaaggccataggttctctgagaagctagtaaacaaggaggagcctaagagagacatacatggtcccctggagaaggggaaagggataagatctcctgagcaaattgggggggggagaggagagggaactaggagaatgagaaggggagaaggaaaaggggtgaggaagacatgatggggcagggatgttgagttgagggaagaacagaagagagcaagataagagataatataatagagggagacattataggtttaaagagaaatcaggcactagggaaatgtctggagagctacaaagatgacaccaactaacaatctaagcaacagaggagaggctaccttaaatgccctctcctgataatgagattgatgactaattcatatgacattgtatagccttcatccaacagctggtggaagtagaagcagacacccacagctaaaccttgaactaaactggaatccagttgcagaggaggactgatgagcaaaggggtccatgccaggctggtgaaacccacagaaacagctgacctgaacaagggagcgctcttggtccccagactgatacctgggaaaccagcatgggactgatccagaccccctgaatgtgggtgtcagtgaggagaccttggaaatctatgggacctcttgtagtggatcagtacttatccctagcataggaatgaactttgggagcccattccacatggagggatactccctgagcctagacacaaggaggttggcctaggccctatcccaaagaataagacagactttaaagaccccccacccccgatggaaggcctcaccctcccttgggagccaaaaaggtatgggataggtagggtgttagtttgggtagggcagggaaggaagggaaggaaagggacctgggattgacatgtaaaataattttctttctaattaaaacaaaacaaaacaaaacaaaaggccctaggttcaatccttgctactggcaaaattagctttcctatcaaagcaactttcctggaaaatttattttgtaatcctaagcatttgaaattgttcttattgaaataatccctttctttcccttccacagagttattaagccatatactatttaatcaaatcatgtagttataggaacaagtgcaatcagtacaaagaaatttggggacaaacacaagtatgtgttggctaatctatgactcaggcagctgcagaaggtatgagccaccatgagtcacagagaatctgagaacattagtcaccctggtgagtcaggcaaataatggccaattggaagaggtttttttcttatttacttaatatatgtgtatgaatctgtgcaagtttctttgtaccacatacatgcatgagcccacagaggccaatcccaggtcttctactagagtattaagtgctcttaattgctgagctgtttctttacccctaaagaggaaaatttctgttagagacatcaagccacgtcctctctattgaagtttattttgttttgtttttaagactgggcgatattgagtccagtctgatgagtctacctgacccagcatgcaggcaccacatccaacctctaggcctggcctgggtcacagatcctgtatgccagacttgtcattaagtcctctgaccctagctagcatataccgcatccaacatctcagctagccccaatagaatgattctttttataagttactctgtagatacacatatatatatatatgtataatatatatatattaaatatatttatatatatattaaatatataatttaaattatcctgcttggggttataaacttcctccaagaaccatagactatctaatgaaaaatcctagtatcagacatggaagtctaagttgttagtaagcagagcccaagaggctcccaaaacaatgtaggctgtcagttttgccattggttgcctctcaaaacttgaaagtaagaccctattgcagaagacaccacatgcttcagacacaacttgcaagaatcaaactgtaactgttctggaagcctcctccacaaggattaattcttataccaaaagtgttctgcaagctgccaagggagagaagggcaattaatggttctattcagccataaagcctacaaagcacatgaccagcatagcaagatattccagtggtgcaatagaggtagttacatcttgggcataaccaatagctttctaattggacataaggcccactcaataggaggaaatacatacctgaactataaacctagccaactatctgtggttggtgaggtcattgatcatagaggaaaacctactattgctactttcctaaaccagtatgattcccaaccttattctaaataccttatttttgtatccacagagaagtatagctctcacccttcatcaaagaagcttcttttgtagcaattgggaccatcacagaaatctacaactggttaaaatcagacaactgaccaagggttgcctaacaccaactgacacaactacaacacatcccctacaactaaggctcaggtaacatcacagaagcagagacagaaagataagagccagaagaccaagaagtctccctcaagataatgtcttttatgtatatcaggaagctgcacagatgaattcacaacagtgaagttgtctaacaagacctgaacaatgactgcctcagttggcaatgtagatggggaacctcacaaagctctaccctaaaagaagagcaataggcaattaatggctgctaagggaggaaaaattagacttctccagggatgagccccctgataggctattcaataccaaggccatccttatgcacaaacacataggagaaagatgtgtgtcattatatgttaaatatatcctaaattgactcagcaggttacactgcatgtgtgtacctgtgcatgtgaacaaaaataattttaaagagtggtcataaatctgagaggtagtgggggacattggaggagttgggggagatggaggaggagaaatgaatatataatcgtatataaaattttcaaaaaaatgtcaaaaaatgtggggggtacatcaatctcaagaccttacccatgccaagcaagtgttatatacacagccctgtagtgcaacggttctcaacctgtgggtcacggccactgtggggccaaacaaccctttcacagaggttgcatatcaaatatttgcattatgattcataacagtagaaaaattagagttatgaagtagcaacaaaataatgttatggttgggggtcatgacggtgtacaactgtattaaaaggtcacagctttaggaaagttgagagccacagctctagtgggatctgaattagatgaggtgttattggctggaatttctattgagaatgtctatcaggatagggcaggttcttcagcgttagaaatctgcaagagacttctaactaaaaggtgaaagggaacaaaaggccttttaatgactttactcttttttgtcttttcatcttttcacattgtttttagtgcaagctatcgtgtgttttgagaaccttgtaatccaatattaatcagttctgaaacataacaaaatgtttaaaatgtatataaaacaaatggattacctttacaatggagagataattccatggaacttagtaccctgaagcaaacattgctcttgactactagaaatagaaactccaaagaattttcctagccctgtctctccagagctactccttgtcctactgcagcctgactgcagaagcactgcttccattccccaaggactctgctttttggcatggacccactaacactctcagccttcacttctagcccctctcaattcctttgtattggccaccaagccacagaagcactctttaccagggagtgctagtggccacaccgagctaggactcctgtaagtgatttttcactatcttttctgtcctctattctggtctctccagaattacaattaaccctccagcagcctgcctgcaggagtcccttctcccactctatatctactccctggggactccaggtgctggggaccacacacacacacacacacacacacacacacacacacacacacacacacacacatcctgctttcctgctgcctcccagccttttctcccagttcatttccattcctttgcatcattggtcaacccatagcactctccaccaggcatgtgcaccacacttgcctgcgaataaacaacccctaaacagtaaaccaaaagaagaggggaaaccccacaccatagcaacaaaacaataggaataaatactcaatattaatagctctcaatattaatgctctcaattccttaataaaaatagacagactaacaagattagaaaacaagacccatctttttgcttcatcaaagatacacattgcatcatcaagaatagatactatctcaggatttaaggatgggaaaaggtattccaagcaaatggacccaagaagcaaccataaatagctattttaatgttagataaataaacttcaaatcaaaactaatcataagggatcagggaggacaccatatacatcaaaggaaaaaacctaccaagaggacattgcaattctaaatatttattcaccaaaaacaagggcatccaagttcataaaagaaacatttctgcagctaaaatcacacattgacctttacacagtgtcatagtcagggttgccattgctgtgaggaaaaagcataaccaaaagcaacttggggggaaagagttcatttggcttacatttccacatcactgttcttcattgaagaaagtcaggacaggaactcacacagagcaggaacctggaggcaggagctgatgcaaagaccatggaggagagctgcttactgccttgctcatcatggccttctcagccagctttcttacagaacccaacaccatcagtccagggatggcactatctatagtgggctgggtcctctcccataattcactaattttaaaaaataccctaaaggcttgcctacagccccatcttagagagcattttcttaattgaggttctctcttctaagatgacgttacttatgtcataaaagttgacataaaattggcaaccatacatagtgataatgagttactctagtacccaaatctctccaatagacatgtcatccagacaaaaaaattaaacagagagtttatgtcattaaataacatcatacatcaaatgggcctaacagacatctatagaacatttccacccaaacactaagaaagatactttcttttcagtatctcatggaactttctccaaatagtccctttgtaccctgtgaagatttgttgttgtgattggtttaataaaccatctgactggctaatagctgaacagaataaggttagggagaaccaagctgagatgctgggaaggagaagtgtggagttgagaggtgccagcagatgctgagagaacaaggtgggcacgtcatactgagaaaaggtaccaggccacatgacaaagcatagatagaaatatgggtagatttaaatgtaagagttaggtagtaacaagcccaagctattggctgagcactaataatttatgttaaggctgaaagtcaatgatttgggaagcagctggatatttggaaacagatgggtggaaaagatatgtccattaacaatgaaccacattgttaggcacaaagcaagtttcaaaagacataaggaaattgaaataataccatgcatcctatctgaccaccacagattaaagttggatatcatcaacaacagaaagtaaacaaactcagggaaactgaacaactcactactgaatgaaaaatgggtcaaaaatttaatcaagaaggaaattaaatactttttagaactgaatgaaatgaaaacacatcacatccaaatctatggaacacaatgaaagcagttctaagaggcaagtccatagcactaagagggtatatgggtgtatggacagagagagagagagagagagagagagagagagagagagagagagagagagagatactaaaaattttagcaagagcgatgaaggagatcaaggggatacaaatggtaaagaaagaagtcaacgtgtttttttttttttacaaattatatgattttatacacaaataggtgctaaacacttcaggaaacttttgaagctggtaattaacacacaaaaaatcagtagccatatactaatggcaaatggactgagaaataaatcaggaaacagtacctttcaaatagcctcaaaaattaccttgggataactttacaaaagcaaatgaaagactttcagaataacagaaaaaaatctttaaggcactgaagaaagaaactaaagaatatatcagaagatggaaatatcccccatgctcatggattagtaggattaccattgtggaactagccatcctaccaaaagcaatctacataatgcaatccccatcaaaattccaacacaattctttacagaaattgaagaaacaattttcaacttcacacacacacacacacacacaagctaaaacaatcctgagtaataagagaactacttattatcaccatcccagagttcaagttgtattacagagctaaagtaataaaagcagtgtggtattggcataaaaacagcaacagctacattgatcagtggaatcaaattgaagaaccaaacttaagtccacaaaattatggacacctgattttttgacaaagaagccaaatataaacactaaagaaaagacagtaacttcaacaaatagtgttggttaaactggactcaaagttgatgaaggacctcaacataaaaccagacaccctgaatctgatggaaaagaaaatggtaataagcttgaactgagtggcacacgaaagggctttcttaacagtagcaccgcactaagaccaacaattaatatatggagactaattaagctgaaaagattctgtattatagcacaataaaaacccagagacagcccacagaatgggaaaagatattcaccagccccatatcccacagagggctgatcgccaaaatttacaaagaactcaggaagatagtttccaaaacaccaaataatccaattaaaaagtggagctcagaacaagatccagaaattccactcttacgcatatacccaaaagaagcacattcatacaacaaggacatatgttcaactatgttcaaagcagcactatttgtaatagccagaacctggaagcaacctagatgcctctgaactgaagaatggatagagaaaatgtagtacatttacacaatggaatactattcagcagaaaaaaacaatggaatcttgaaattcacaggcaaatggatggaactagaagaaaccattctgatccaggtaacccagtcacaaaaagacaagcataatatgcactcactcatatatggattacacatagagcaaaggattaccagcctacaattcacaccactagagaagctaggcaacaaggactctaagagagacatacatggtcccccagagaaggggaaagggagaagatctcctgagcaaattgggagcatgggggaggggagagggaactaggagaataagaaggggagaagaggaggggtgatgaggacataagggagcaggaaggttgtgtaaggggaagaatagaggaaagcaaaataatagacaccatcagagccagtataggttcagagaaatcaggcactagggaaatgtccagagatctacaaggatgacaccaactaaccatctaagcaacagaggagaggctaccttaaatgccctcccctgatactgagattgatgactaacttacatgcatcctagcgccttcatccagcagctgatggaagtagaagcagacacccacagctaaacactgaactgaactggaatccagttgcagagaaggagaagtgatgagcaaaggggacaagaccaggctggtggaacccacagaaacagctgacctgatcaagagggagctcttggcccccagactgatcactgggaaaccagcatagaactgatccagaccctatgaatgtgggtgtcagtgaggaggcctcggaaatctatggggtctcttgtagtagatcattacttatccccagcataggaatggactttgggaacccattccacatagagggatactccctcagcctagagacactggggagggcctaggccctatcccaaaggatatgacagactctgaagaccacccccatggaagacctcaccctccctggggagcagaaaaggtatgggataggtagggggtagggggtaggggaggaagggagggagagggaactgggattgacatgtaaaacaatcttgtttataatttaaattaaaaaaatggagaaaaagaaaagaaaagaaaaaaactgaggatgaaatttgtagaaaaataaatattaagccaggtgacccagcctcagaaaaacaccgtgtgttctttctcatatgtagatcttaactttaatatttgcatatatgcaaataaagggttatgagaagggaataagaggtgctgagaaggggaaggccatgtaacatgtaagaggaaaggaggttgctgggtgggaggacatggggaagggtggaaggtagtgaagaaaagggtgagaaacaacaaaaattttatgttaaaactgtcataatgaagcctaattctgtataagctaaaataaaacaatgataaaataaaaataaaacccagagacacatattgggtttaaagctgaagatcagaaatgcaaagtagccagccactagctttaacctctacctcggaccaaaatgggccatcctgtctccaggaatcctcagactgaatctgactgcatctgtctcctgccttatattcctctctagtgctaggattaaaggcatgttattccaagtgctggcaacaaaggtgtgatctctgtttctcttttagactgattcattctcatatagcccaaggtgaccttgaactcacaaagatccatctttctcatctcccaagttctgggatcaaatatgtggccaccactgcctgtcctctatgggctaactagtggcttagatgtgttgctaactagtggcttagttcttaactaggtgtgtagcaaactagtggcttagcgctgcactctgatcttcaggcaagtgttgttagatcataaacaaaacattaccacactttatggtaaaggttaccatcattcaagcaaacagcctaaagaacagacaaaaatctttgccaattatatatctgatagagggttagtacctaaaatatgtaaagaacaaaaaacactgaacatcaagaaaacaaacaacccaactaaatagtggggttcagaagtgagcagagagttgtcaaaagatgaaacacgggtgtctaaagaaattttcaatatcattacccattaaggaaatgcaaattaaaactactttgaaattttatctcactacagtcataatggccaagatctgcagcacaaataataaaaacacgtggtgttcctctgatagccatcattttctctgaagtaaattgtggttgccagaagactgattttgagagactacaacaggaaaatcccaagatttttcagaggcttagggaaaaaaaaacaatagaaaacctagctggcttggcagggactcccagaaggagcccctcatgcagaaactccagcctgggcctgtggcttcaaagccacaggcaagcaagcagcttttttgtgaatttgtacctttatgttgggctccaatatgtagtacaattaataaaaacccagagacagatattggggttcaagctgaagatcaaaaaagtaaagcagcaagcctctagagagttcttacctctaccaaggctggggcaaacctgtcctgggtgtgactagagactgaatacctcatgagaccctgagttccctacatgcttcccaagtgcagggattaaaggcatgtatcaccaccacccagcttcagtggctacctagtgtggctactgggattaaaggtgtgcaccactgctgcctggcgtctatggctgtgactagctttgcattctgaacttcaggcaagttttattagatcataaacaatatattactacaaagattattaacacaaatgaccacacatgctgggaaggatgtagagtaaggtgaacattcatccattgctggtgggagtgcaaatttatacggccactatagaaatcagtgtggcagttcctcaggaagctgagactagacctacctcaagattcagcatatcacccttgagtatatagatcaaggcctctatatcctaccacagagatagtagttcatctgtgttcattgctgctttattaataatagccagataatggaaacagtctaaatgaccatcaatttatgaatggataataaaaaatatggtacattcacacaatggaatgttattcagctgttaagaaaaattaaattatgaaatttgcaggtaaatagatggagctagaaagaaatcatcccaagtgaggtaccacagacccaaataatgtgtgttttctcttctgtgtggatgttagcttttaatatttctgttttctacaattggaataactatagatgttaagtactgaataagttactagtggggttgagaggctctcccaaggaaggaaaattagaatatagtgttacggagagacaaaagagaaattagaagggagagggacgggagagaatggtaatctaaaagtaatataaaagaagtaacctaataataggaaaggcaatgccccaactagatatcttatgtcactaagaaaaaactacagtgccaggaatgttgtatcttcttgagctgttggccagaggggccaaatagaaatccccatacaacacagggtacttattaaagctattggttactctccagtagcctgaaagtaaggctctattgctaaatacaaagtttacttatgtcattggacaagaagttgaactggtgtctaactagaagtttcacccctactaactagtactcatgatactggaaggtaccagaggagaaagataatcatcaatatcacccagctactatgacctgcaatagtaacctacctgcaagatatactcatgcaactgtggcatcaatgttatgaaagtaacaactactttttaaattttaatttaagacccaccctataatatggaacccataaatgatacttttaaattgaccaagaaactgagactagatagttcacagacttaaaagattctctggttagggttgaaaatgcgttgatctatgggtatagcaataaaattactcctgatggcattctgctatacccatagatcaatgcattgctcaaccctaaccagagagcttcttcttgcaatatctgggaattaacacagagacccaaaactggacaacagtagtagagagtaaaagactttgaaatactcaatcctaaatgggatatttttatcaaacccatcctttctcaagtctcagggatctgtctcaaaagaggaggttgaaagattgtaagagacagaggtgataaatgactccaacaaacagtgtctaccagacacaatgatactaaacctcctatacagaatctgtcaccccacacataagatctacacagatccaaacaagatgggatcccagcactaagggggaaagacagcatggagtcctactcctgacaaagaagtcctctgtggttgacacccactagcaaaggtaaaaatcagttttctccaatgggctctcactaggtatatcaactacactttagggtaggcctcctgcctaggagtaattgaccagcacaaaactaacttaatggtatttttgttgactttttgtttcatttgattttgttttggcttttttaaaattattggtcttttgtttgttttgattgtgtgtgtgtgtgtgtgtgtgtgtgtgtgtgtgtgtgtgtgtgtgtgtggctttgttttttgtcttttgtttgtctgtctgtttttaactagagagagagagagagaagagagaaaagaacataaagctggtgggtaaagatacgggaagtatctggaagaaactgggggaggcttaaacatgatcaaaatatattgtatggaaacaattttttcagttaacaaatagaagccaaaaataatgatagttgagacaagatagtgttttgttttgttatagaaatggttaatctgtttctaggatgaaaatgtcatagtcatcaaagacaaactctctttcactctcctccattgttattttgtgacttcctcctcaaattggctccatggtattgagatggctgctgcaattccagtgatcaaattatcattctagcagggtggtggtgcacacctttaatcccagcactcgggaggcagaggcaggtggatctctgtgagttggggggccagcctggtatacagagcgagttctaggacaggctccaggacaggacacagagaaatcctgtctcaaaacaaacaaacaaaaaaatttatcattctagatgggagaaaaaagaaaaagaaagaaacgaaaaagaaaggaaatagtagaaaggcttcattcaactaactcagccttcctagaaaatatcccttggaaagctccatctagtggcctctgagaagtcaccactgttttttgtattttgctttgttttgttttctgcaaggcatctaaaaatgtcattttatagttaggctcaagactcaactattttgagttctattattgagaaataagaagagaacaaatatccagtggataatcaatagagttccttgtgggcagcacagcagaacactggaagcccctgagcagttaagacctaccttaattcctgcctgctcagggcaacagggaatcagctgtatgctgtatgcctctcttgatttctttctgtggaaatgtgcacttcttaagaactgtgtggaactttccttttatttcctgtctccatttcaatccacacactggcagaatgtcagtcttagactccatcctaagcaaacagatgctgctagcatgagaagaattcgctttctacagagaatatactgcacacatccaaatctgaatttgtaggcacctatatatttgccaataagtagcctctgagagcatggagtgccccaggtagctcaatgactgctcagagacccttccaatcttcaaggaaacaaatactttttgctagagtgcaatggtctctcttgaattcagtccaacatttgttacagtatctcattgactcatttggaaacacaaacatttaggaagccttgaagttgctagaatgggtctattgtcaaaggtgtcacacctagtaaaagagatggccaaaagtgtagagagacagatggtctatcaattcctggcttcaactgttagtacaaataaatgaacaagtccatcctacaagcccattacccaatggctcatctggacactctactttctttccctgggaaaggcattaggttgctactctctctttgggacactaggtgctgctcacaaagtgtctccaattactctctcctaggctgtatctaaccctcccctctactgtcttcatctctagtgctactctcaaatgcccaacttcctggagttgctcttcgatgagaagaccctaccaggaccaactgtgattactttggcttccctggttgggccacaaccatgatcacctccaaccaatgagtaatccctgacagacactctttcacaccatagctcggcctcttggatttacatagcttggtggatatagaaacttagtaagtctatggatacttgttcatagttgtaaagtcatcattaggtcctgagcctcctcccaaaatctaaatttccagcagtgcaaaaatatctttcctgcattcttagttgtatcttcccattatataagtaaattgtctgaggtcgaagtcatgattcttagagaatttcataattcaagaactaacaactaggtgttatggttcacagttttagtcccagcatttgaaaggcataggcaggcaaataaatctctgtgtgtttgaagtcagcctgttctatatatcaaggaagaaagaaaggaaggaaggaagttagcagtgacttctgtttgtaaataaagagaaatgtagtgcaagatatatatgtatatgtgtctatatatatgatattttctgccagcatgaatacccaatcacacataacttattttctcatctaaaatattctttttctgtgtagtaacatatttgagctttccagctgctcagagatgtatggctatcaggcaagtatcataatcctttaagacatcagaaatggaatgttcagaaggtcaaataactttcttaaaatatctccaacagtgtaacagaatttgatctccaatcctggtctgtgttaatgccatgctaccttaacagagtaggatgtcaagccctttaggcatatgctaaggagggatatagttgagtcatatggtagaattatttttggctttttgataattttccacactgatttccagagttactggaacagcttacaatcccttcaacaaaggataaggcttccctttcttccacacttcatctaatatttgttgtcttgttgtccaccacttgttgaattttgctgttctaactggggtaagatgaaatctcgaagttgtttcaatgtgcacttccataatttctagagatggtgaacattttttttgagatataccttagccattttccccttcttttgagaattctctgttcaggttccaggttcactttttaaattagttgtttgattttttttacttcatcttttgatttctttattctgaatattaatcctgtcagatgtataactggcaaatattctctctcaatctgtgggcttcctcttcactcaagtggttgtttctttagctgtgcggaatcttttcagttttacgaactcttacttgtccactgttgccttaattctttgataaatggagtccttttcataaagttcttttctgcacctatatcatgtaagtaaatcttatattttcttctagtagtttcagcgttttaggtttcatatttaggtatcaatccacttaaagttagttttgggtgaggtgatagatacggctctaatttaactcttctgcatgtctgttcatgtctctgtcattcattccacaaaacctacagctataggaagcccaagataactatggagaggcatctgggggtgtgggaactagaaagcagtcttcctgagctcccagccagaagccaatactagcgtgccaaccaagtgaatgagcatttttaggtcaagcagtcccagtcaggatatgcaagcagtctccatcccaccctgccaagttggaagatccacagaccaaataaataactgctagtattttaggtcaacaattttgagatggttcattttataacaaataactgggatccactttttaagcatatgctgatccccttcatatcactgtgaccaaatacctgagataaaccatctgaaagaagacagattcttgttggttcatggcgtcaaatatgtcagttcatgctgatttggcccccattgtctgtgggttgtgacaaggaaatgagtacatcatgaaggaagtgtgtggcagagaccagctagctcactgcatggcagctgggaagcaaatagagagagagaattatgttagatctcaatatccccttcaagggaatgctccaagaacctaacttccttccactaagccctctcctgaaacacttccatacctcctgatgatgcactagctagtgaccaactcaacaacatggcctttagggagacatttaagacccaacccaaaaccaaagacatacatcaaactggttaagcactgtgagcatcttcatgtttgtttcccttagtctttctcacaagagaaaaagtaaatgaaggcaacccctttcaatttatagaagcaaggaaaaagagacaattaaacaaattgttttaaaatgccttcaaccctaaataataatatcgtactataaatatgttagtatttggttcaaaactctgtgaagagaattaagccctcaagctttgacagttccttgaaggccttctaaatataggaaaataaaactgaaattcgtgtcactttgttaatggcatcacttaaaactataagttaattaactaattaacaacttaattaactcagcacttaatttacttacttgagttcacttgaattccctagacatgatttaatgaactttcagtgtaattcctgactaaccatgtaaattgtgcgatgtgtatctgttcaattgagtagatatttcttgaaattaaataatttaagacaaatgctaagccttactgtgagttttcttttctcttcaatagagaaatttgaactggaatttctggtatagcagtttttccacactccattttattttctttcaaaaccaaaaataaaacaacaaatacctgagtgggctgatctttttaaacgtattttcttgattcttttctgttattattagatatattaattaaacataataatagtcattataacattttatacatgtatatattttttaattatagtcacctcctgttatcatcacttactctcctttcactactgctgatcccttatcttctcaagaagtctggatgctgtcatatcttttcattttgtttgtttgtctttggtttttgttacccaatgagtctcattcaagctgcttataagagcctggataagggggcattttcaggagaatgggctacttaccaatagctgaactaatgaaggaactattcctcacccagcaaacataactgcttactgaacgtcacgagttccttccttctccatgatgggatattgaggagccctgtcttgtgcaagtttcacacacctcatgatggctgaaagaactgcccctgggtcacacaatacttacaaagcacaagagaaaagcctctgtgcatttctctttatcatgtgtacacttacttctctcacttgttcacagagatgaaactacattgctcatgctggagtcattggggctaccttactctatttttctaatagttcatttttgttgttttttttttacaaatatctcactctaaaatgaactttcatcctttgcaaatctgacacttcttcaaaggtagttttagaagccttgacttaactgtgctaaaccttgggaaacagaaacaaaatatgaataagtgtcccttgctctcgtaaagcttctgtgttgataggaaaggtggagtgatactgttatacactttactcttaagcagcatgtgctgaatatatggagaagtaagaaaatcctggtaagatgggaaagaaaagtctggtggaagaaacaaactgggagggaatgaaaaatggagagccataagaatttcatgcctagcaaatcatgtgactaaagtcaggaaataaagcaggttgtaagaaaagcataaaactagactcatctggtgaaagaaaaggtgacatggtacataaataaaggcaagcccagcgcccaacttcctagatggcttcctaaagactactaagagaggtgcacctgatgagggcaaccccaagaggcactgaaaatttctgagttgagaaaaggattctgagatgagagaaggatatcccaggttcttcaggtaacttgctctgtctaagtagcttgagagcatataggttgaaattgttataggaaacatgtttaatcgtttcaaaatagtgatcagtatgtagggacaatgatgatctgccccatgaagagctcaagtgacagtttgctgttcactgtgtatattttaagtccactggtatcccatgtgagccttaaactaactctgcagtcaggttctatattaccatctgagaggaattggctccaggaaccttgaagataccaatatctagacatgctcaaatctgttgtataaaatagcatagtgttgcttgcatattacttaggcgcatcaccccaaatgcctcaaaccatctctcgattccttgtattacctaacaccacatagctgttttgtaaaaagttattacactgtgttgcctagggaatgactaaaagaaaaggtctgtaaatgtttggcacaggattaaaaatggttagcaaataatcaactgcatggatgccgagccttagcatagacagagggttggctgtgcaaatgccattccttgataagttggggaagagtggcactcattccttcgcatctaggtctacagaagtgaggatgtggaaggatcctgtctctgcccttcgtcagtcatcctgatgtgcaatcttagtgtccaggttctcaggcttctttgaatgtacctgattgatgaaaatgtggcagatattctacacaagaaaaatagtaaagaatagaggaggggagactagaaattgtgagctgaaaaaacactccaacatttaatggctaaataatggtttgttatttttcatgtttctggtggttgactctgtctctcaaatatctgtttcgtacacaaggattttaaaacagaatgtttggaatatagtcaatttattaatgcaattgagaatccactgaccttgaatatactgctgggcaaaccaggaatcctctgataggcaactttcatttggatgtctttctgatcccataatttcagaattagtgaaagatcaaaatgtatgtaaaatataaaaataatacaaagccagaacctcctgtattctgtaagtatacttaatttggtcctcccatttatattattatgttttaaggatttgctttatttttatttatgtgtatgtggaggatgccagtacatgcacatgagtgtggttgccctggagctaggttatcggtagttgttatctgtccaatgtgggtacctggaacccacattgagtcctctagaagagcagcaagcactcttaagcattgagccatctctccagaacaccctctctcatttatattattgaaatacttgctttatctattgtcaattttcagtacacaaatggaggtggcccattctttccaggaagcatttgttccttttggaaaagcactttttttaatgtataagtacaacattcataatttccaagaggaaatatgaggtgtattgattttgttttctatgctcttgtggaaagcaatacaaatgcacatataaatcaaggtagattagagtttcaaccaaaaaaaagaaacaaataaattgttccttgacatttctagatgtatccctgtcataccagggaactgttgcatcctgctgtgtccatcaccaccaaaagcaagtacccactgctggcagaaatcatcaccttgctgccaaggtacctcatccatctgtgggagggactctccttagctgctcccttactcttagcctgcagactgtctcaaaaggggaagaccaggaggaggagtgaaggggggggggaggacaagtgtcaacttccttcagtctttggtaattgtccccttgacccatagcctgggcatctgtttatattctgaaggaaaccagcccactaggggaagagaaacccaaaacagaaggagcagggcctcatgactgggcttgtgactgagcatctaatgatctttttaaggagggtgtgaggaggccaacagccacttagaagagcctgaaacaagctggctggaggacttaggttgaagagaggtgtcaaattaatttctaccaattgtgtgtgaaatcattgccaaagtctactttgggatgcccagagataacttcattcccggcaccctgctgacttaggaaaataagccttactacccagtcaggcatttaatgtggatggtaaatcatttgtgattactaatgtctgagcactttgtcattgccaggccctcattttccatcagagcagtcctaattgatttaaatggtctgtttcgccttggtgcacgcatgatcacgtcgtaagtggtctttaggactattttaattgccaaggatgtttttccttaagaaaatttctgccgagagcagaacaaattattattgcaatctacaaacacacaaacattgtttttctccccttgctgcatgttttgttacagcagcctctcctcatgtttttttaaagggggggaattccagtcttaatttatgcaaaattaattgatatatcttttataattgatgtgctgtaaaattaatgagtaatttatgtaattagtcaattaaggataattccagcatatgttcaatatgcccagaaggtgtactttacaagtagttatttgtccaggagtttgatgctgagaaaactacctaattaattttttatgcatatcagcttagtatctatttaacagctccctttgtgatagcagatttaatatttatctttctaacatgtctgagaggatgtacaatggatagcctcttggtgcctctaagaaggcccttccagttggatgctttctcgttttaattataaaagatctttgcaccaatggatcaacatccccccactgactaccagagctctaccacacagggactgagacacacacacacacacacacacacacacacacacacacacacacgaaggggtgggtaccagtgcccaaaggtgtggtgtctgaagtcagagacattataaatcgccatcattagaaaatgtttatgtggaaggaaacgatcatgggacccacctctttaaaattctttaccccccccctttccctgccgatgaccctttaaatgtatcttagaggacttcgggggcttttgaggcatagtgagctaggtctgttggctaattaattgacactgttttgaatattcatatctaatatagccagtatgctcttaattacattgttggacttctctctaaggagactaaatcaccaaagacttaattaatgtaatgtattccagaactggctggctgaaaagggagacagttactgtcaggagtttcaccgcgacacctggttgctgatgtgaggagtctttgttattactcgtccgaggaagcgcaaaaaaaaaagttatgtatttttttttaattgttggttatttatttggtggctgtggttgtcggtggctgttaacctaagcagacagggccacaaagaagctcctagaccttagcctgagaggcaagaacgggtggggacataaggcaactgctcagggcaacagcacccccaccccaccgccgacacacacacacacacacacacacacacactcctccactcaggcagcgcactatcaggttcaaagaaagtagaggtgctgtcctcagctacccaagtttcacaagtcaagtttctggagtgaaaacgccaggatcttgagggcaatttcatgtgcccaaagaaactcgggtccaaccgtcctacagaaagcagcggtaaggagaaggtgagtgccaggtaggtaaccctgcagctggagactggacttcagttgtagcttccttctgctagctgcacatagggctaggccagcctgagagggagaggactagaaattcgaggaaacgaaaactgagctctcttgggaagcacagcaggagtggcccacccacgcggccctcccacgcccaccctctcagtgcacctcatccgaagtgcccacacctgcgcactctgcaggcccagcttcttgaacgttcctcggcctcaaccagagtttgagaaatactaacatggaaccgagtttgaaagatgataacagcgtgaatcaattttatcttgtttgacgcctcaaaaggaccgcgctggttgcacacagccgactctggaagctttcctagacaaatgtcgctcacacacgcccaccctaagaatcccactcctctccgttactataaatccaattatccattttagaaaagaggaaactgaggcccaagaagttacagccacgcagccagtaggtggcgaaactggctttctattaaacccaagtccggtgccttcttttctctctaagaaataattgtcctaagctctgttggctgacctccccaggaggtcccagaatttcaggaaatgcaaacaagcttctcagaaattcaagttgagtcggcacaagtacctataccagggcgcctgcctaactcttcctggtgggtgggaaaccttgtgaggagggatgccctcgcgaggctgctgggtgggttcgggaagacagagtgttcagattcctaggacactgcaaaccgaaccatggaacagcggtgttaactaacacggattctgaggcctcagctcagagttcttagacaccaatttggaacaggtgtcacaaccctaaacgctcggctctttagactctttagagcgggagagctttggaagcgcttctgacctctgactatttcctgagaagaaaataaagagcaaagaaagaaaatgacgcctccagggtcatcctgcaggtggcctcgagggttgccactgggagctacatgtctggctctggggccagtttctcccactttacattcactccggacatgtggtgggaaaggatatgcccgggagtctcaggggtcaggctggaggcagagtagagtggccatggtgactcctggcaagatcccaaataagactaacccaagcgatttccacatgtcaaatgtctgagtaaaataagggtcctatgaaaatcaaaatccggtctggaccttttgccttgatgctaaccctcaatgttgcccttgccctgcgggtaccctgctctccgttacactgtgtgtggaggggctcagaagcctggagtaagcccatcgtaaggcttggggaggctgtaagacccgagactgaaggctagagtcgtagaagagagaaaactgaatacatagccgttcctggacggccacatctttttctgcagttttaaaaaactaccatccatacagccagttcattgtaataaagcccatcttgggactccggatcacaccaaagcgtcaccaataactgcctaaaaggtaaaccaaatacgactgagatacagacactaagtgactgccggtggctagattgtgtagttgtttgtgggcggcgtggggtgggggtagggtggagattacactgggtaacttaaatccaaccgtttgttgctggggcagttacaagagacgattttctggaactgggtctgcagacagctggagaatgcacatcccgacccgggtactgctgctgcagccactacaagcctacacaactagcctgaattaaatcaaccttgggaggctagtagagcgaactggccccaccacaaccgcccaggttgtgtggcgaagccggccaccactcttgcaaatcccggaggattctgattggtggcggctacccgccctcctgggtccagatcgtcgggagcgtggctcctggtcagttctcttggccgcttgggccagctggagccccggtggtgggcgacattctcttcccttgccaaacccacactgaaagcgacagcgtgtggtccccgtcgcagcgcccggccttcgctgctctgtctgaatgattaaagttgcatagagctggccgcctatccgggttggctggcccaagcaggagacatagaccacccatctcgcgcgtcccttggcgactaactctaggtggcggcggcgggttgcccagctctaccgagagtcggccttgcagctgtagggttcagggtccacgttgcaggctgggtttgcccctcacgtactgaaagggctctttgccccacccccattgggttcccggacgtttcgcaggctgcttgtccaggggaagaaacgtccttgactgattccagaaaagagactccgaggatcccggatcccgcggaagagatgccctagcgaagcatcaacaaaagatgtttgcctgaacagcctttaagcgccaggcgtgtagagctgcccgcggaggcgtcacaagggtgggtagaccccaacctgctcggttggacaggagtaagagtgacccacctcctgccggtttgtctgtcactgtaaccgtgggagccctgggaattcctctgagacttctccgagtcactctgctgctgggctcgtaaactgtctcagctaatgaaaaacctcgcagaaattcctttggctcgagaaaagttcctgacttgaagtggcagttgagggcgtcttcttgcttcttaggccaggcgagaaggctaccacctctctcctgccgccgcccccaccaccctcatagtctcacacacttgatcttactacctatgggataggataggtcccgtcctaagaggacaaactgaccaaacagcaggagctagaaagtttcgctgagggctaaaaatggagaaaggaatcggccctgctcgcctcactccatcgtctctgccaagagaccaaatagggacatacacccccattctaccacttaccaaaatccttgaacctatagccaagattacaggataaagcctgtctacctacttagccaaagacttctgcctctgggtttatgcttaggaaagaaattcaaatctacgggagccgtcgccttcaactgctcttttcaagtgaggaaaccggaaagaacccttaaatttccaacttcagaaaaaaaaaaaaatactgaacctggggcccagagacaggaataacgaggatgcttgtttctaaattctaaattctgctttctctaccagcctgagagcaaacatgacccaaaccagaacaagacttcaggttctttgaacaggcgttgagatttccgtgatggctgtggggatgagtgcaacaaccaagcaggggaacctttacccgtggctcagccactgtttccttacaggtcacacgaaggtttgatgatatcttggcttcctgtgtaatttcaatgatagtcctcacgctggtaaagagaatcgccacacaaccaggtgatgagacccctcagctcccaattcctcttttttttcccctgcttgatatcgccaccccctaaaaaactttatgcagtctgaccacgcatcccccccctccgccgccgccgcaagctccttgcatcctagctccctgcctattgtccttcaggcctctaagccaagtttctggagtgcaaagagcaatccgtgcctccctgaacctagtgcgtataccgggccaataagtagggtaggccgtgcctaataaagtcaggatgtaaacgccccagcttttctttctattgacttccaccgacaaccctctgggcatctttatttctccaagagaagaggggttgaagacaatgatgctccaaactggagacccagtggctagcacaggaaactagaagacagtggatcagaagacctggtcaggggtgagaaagcagcgtcctgcccccttgctatgggccttagaccatgtggagcccaacaacagggactgtccctagacagcgacccattttcagtggccaaactgcgctccctagacagcgggaatgcggcctggactggcaaatggatagtaaaatgcgaagggtcggatccccagtggaaatggataaggggcgggacgatacacagtgccttcttgcccgttcttcaggaaaagactaggctgtggaggcggcgagtcctcagcctcggtcatgtgatagtctggaagcgcaagctgcaggggtctcggcgtctcggggaccattacaaaacgcagccaggagagcgcgtcgctgccacaacagcgcttcttctcaaaacccgcggggcagagcggctgcagctgcagcgcagacggctgtgccgaccgggcgagccgggtcctggcctgtcttcgccgacgccccctgcagcctgaggctagctgcgggagtcctgagcaccctcccctccgtagagtctgcaggagcttctgctgcagacaccaccaaactttttttcctctgagccaccgcctggggctcgatgcctcttccatcctcagttctgctgcacatcccctgagaaagagggcacaggctgatagaagagtgttctctctccccttatcctgccacttccctcttacaagatctgaactccggcgccggacggacccggaaccaccaggtcagctagcttccaaggagttgaaaagtggggttaccagcggccttgggacagctagcacggatgcggttttaaagagctggagtctccactgcccaatcggtttgacgagagctgcccttgcaccgagaaagggcaaagaggccaaaaagaaatttattcaacagcctttcgctccagactggtcacccgagtcagaaaaccaaggtaaagctgacgagcctctccggctactgtgcgggcctgtctgcgaccaaaagttgtgagcaccatcgagttgcattggccctaaaagccagccgtggggacccctgaagtttccagaaggaggaggacagaagcaagggggtcctaggggctgagaaggttcgggatcctggctgtacaagtggagagagagagttagaggggacgtttaggcaggggatcgggcttctgagaggcgttgaggcccactgtgggccagtaggaggtggaggagcctaggaagatgccacggccggggaagagctcctacagcgaccaaaagccgccgtactcgtacatctcactgacagccatggccatccagcactcggctgagaagatgctacctctgagcgacatctacaagttcatcatggagcgcttcccgtactaccgcgagcacacgcagcgctggcagaacagcctgcgccacaacctctccttcaacgactgcttcatcaagatcccgcggcggccagaccaaccgggtaagggcagtttctgggctctacaccctgactgcggtgacatgttcgagaatgggagcttcctgaggcgccgcaagcgcttcaaggtactgcgcgcagaccatgctcacctgcacgcaggaagcagcaagggcgcgcccggtacggggcccggaggtcatctgcacccccaccatacccaccacccgcatcaccaccaccaccaccaccaccacgcggcacatcatcaccaccatcaccacccgccccagccgccgccgccgccgccgcacatggtgccctatttccaccagcagccagctccggctccgcagccgccacacctcccgtcgcagcccgcgcagcagccaccgccgcagtcccagcctccgcagccgtcccatcccggcaagatgcaggaggcggcggccgtggcggctgcagcggcagcggccgcggccgcggcggtgggcagcgtggggcgtctgtctcagtttccaccctacgggctgggctctgccgcggccgcagctgccgctgccgccgcgtccaccaccggcttcaaacacccgttcgccatagagaacatcatcgggagggactacaagggagtgctgcaagctggagggttgcctctggcatctgtcatgcaccacttgggctaccccgtgccaggtcagcttggcaatgttgtcggctcggtgtggcctcatgttggtgtgatggattcggtggccgcggccgccgccgctgctgctgcagctggggtcccggtaggcccggaatatggggcgttcggggtgccagtcaaggccctgtgtcactcggcaaaccagagcctgccagctgtacctgtgcccatcaagcccacgcctgcgctcccacccgtgaccacactgccgccggctctggcagtccccacggcgtcacaacagctgcctgctccctccgccgtgtgcacggccgccgcctcacccacagcccctctcttggagcccaccgcagccagcactgctgacagcaagggaggctccctgcactcggtgttggtgcactcctaggggaggagacacctggcgagggactgagtcaatggccctagatcgagagagcaccccaaagtggcagacaaagttgacttcgagcaaaatataaggcatttaaaaaaaaaaaaaaaaaaactgatcgacgaccctaaagtggatgttccactggtctgaataaatgtaaccaccaggtgtctgtgtttatactatcttgtaaatcagattaatgaatgcccattttcaggtaagagtttttattgtaataaaaatcggtaagttatgggggagaaagcaagaaatggttagggaaaactcatttcaggcaaagaggaagtggtgttagcccctttcctggagcagaagctgaaccgatctggcacaggagatgcccccgccccccgacagagtgacaaaatggacttgagaccacaagtttcagtcttcaggtctcgtccgtttgcagccgcctccccactaaagaaagctcgtcttagatggtaagagaaaggatgagttttcctcgttatttccttggtcaggaaaaaaggacgagaaaacgacgccacgaataaagtcgctttgacggcaaggggtgtttagcgggatctttgggaaacggttacatttcttggctgtgacccggggtcgaggaggatagtagcgacagctaaagtaattagttcgcacaaaagagaatggcggcggcttaaagagcaaagctccagattccaaaagtaaagttcagggagcctccagagagagacaataaaggcgactttccacctgcgactcctctatcagtcgggtgagaaacccttacggagcctgagaacacgttcattcccacgaccggtttcatgtgtacttttaagaaaaaaaaagtcactgtatcacagatttttttgctcctctcattcattagggaacctagtcacctcggggagaggggcgcagcgcattggggaggaggggttgccctttggtggctgtccgctttctatccccctcgtgcacaaatgaggaggcatcacctttgctcgctgtgtgtcttttcaggcgaattcttcaattttgtgaataaattcaccctgtcactgttgcccttcctgggtttggagacccaggaacagcactttactggcgacaaacttagggaggggtgttgagtggccctggttccatgtcccctctggcccgtgtctgtgccacgtcgttcctgtttgccagtgttgtatcaggtgttcattaaaacgtctctctggatataccagtgcctgtgtgaggatgttctcttcttaacagatgaggccacagttgaaaattctcccccagtccttaatttcttaacttcagagtttcaagaggcctgagaccaacgggagagccttccctgtagttccgtctaccagtcagctcgctaatctctacccattttcgtcactctactttgcttaactgaatttcattaagaccatatcaacattagagtctgaactggcaaaaccccgcaacagtaaatttttctgaggttggcaggggcggggcagggacccaggtctctacccaaggagcagatgtgtggctggattatagcgggcccagagcaacaaggttggaagacgccactgctttcgtggtgaacactaaccaggtaggtgggaaatgccactgcgatctgataagacttgttgcttgcctagcctagggaagcagggtctgcgaggcgactgctggaggaggggtgactactgtctgggcatagagacatgaagctcttgggcctcgaaccaccctagcaggcacccatggccagaaccttcaggtggcggggcagatgcgaaacagcaggtgagaggccatgttggatttgggaaatcctctgctcagccctctttccgcctccttctaatctccagcaaaattccactagaagccagttttcctgtgcctaccaagcgtaagaaattcctccgaccttccattagaagaccgcaaagagacaaattgctggggtatgtttagggtagaccctgaaaaaacaaatctcaaaacaaataataaaacaaacaaatggcgtttgtgcccatccctcttttacaaatctcattatagtgtgtcacaaagttttgacacatcttaggtagcagcctcgttggcagggctcagtcaattggagagtttgtctagctttcgcgtggattttctactctactagtattaggcagtagacagagaaaaaacagccagagagacattgatattggggtcagagtttcgcgagaatttggagcctgacttctctgcctgtccactttccaattagttagtgctggaagccccgctgggaactatttcaggggactatagacatttgacccgaagaaagagcccgtctcttaggcgtttcttcaaaaaagtaacacctctcctctttcttctggaccagccagagtggttcctggcaatttttagtggtgccaatggcccccattctgggaccttgtctctgtccccaaaaggaagcaaacaagtagtggaccatttccaagacccttcctgcacccacccaacccctgctggtaccctttcagcctcagaggggaaagctgattgtttcatgtttagaggaaagagggcgaggtgggaaggcaaagtgaagtccacgatgattgtgttcaagttcttgtttcaggaagaaccctggtgtcccaacgaagctgtgcatagcatcaggatagcattcgtcaaaataagcaaaggggcatgttctgatcctaaaggggagggctgtccccagttagacacctcctctgttcccaggccttccaactcagatgggatttgactgcactgtgagggcatctgtctccatgaacagatgctgccaggcgggaaacctggaacctggcagagcacttgtggcacacctgtgggatactagaataagaggacaccaggccccacaggattcagattattattgtcatgtaccaaaacaggtctgcttaaaggccctgtgtttatttcaaacaagttgttagggttcaggccactaacagcatattgagtttatataagtcactgaaactggtagaaagatagtagttaactgtgtgtgactttggtaactctcatttgggtatgtggtctcatgtgagctcacaggcagctctgccctctacatattagaaaacagaaaattaatttgaaacattaatttttcaaattcaacaataggtgagatgaaaagaaacaattataatttataaacttcttgggttacaggtgtgattaaaaaatcattttctaaagcaggctactcagtgggtacagaacaaacacccagttgtgttcttgggtgccaaggtggtagaaaaagctgtaattactcagcccatacccccattcaactgaattaatggaacccctgagaaaggtgggaaaaaaatcagtgagggaggggaggttagtgtagatgtccttgtccttacagacaggaagaaaataacttggaccaatcaattttattatttcccctaaaaaataaaaataaaaaatgaaaaaaaaatgagccataggctgagagagaatgaagccacatttagctatagtcttaaggagagcaggccctcctgcaagggcccattggcatggttggcatctggcacttaggaggtttgtcagccaggctggcttgtggtcaattatctccttaagtaatctggcattagtccagccagagaggacaactagttgcattcccagaaatccgagccagttaactgaaagtggcactgctgaattccaaacatctttacacagaggggctggaaggctcaacacatctctctataggactcaaaggtgatgtttgccagcttggcaccagtacaggagtcagaggagaatatgtatatggaaacagaactgcctaggagaaggctcatggatcaccaaagccatacataggctcccttcaaaatccatccacctgcccaaactgccagtactaaaggacacaaagtaatagagagcttttacacaagggaatcctcactcctcagtggaaagaaggacagttggggagcatgctcaatcccatcttgggtggtggtatttgtgacaagatggctgtgtctgtcacaaggtgcaggctcagggtgttgaaatgggaaactaaaaaacaaatacaaaaaccaggaataacttttgttaagggtttaagggtccagtggagatgcaaatgcagatggtgagtccttgaattctggaggggaggggggacaaaacaatcttttcaagttcgatgctcccatgtttctcattccaagtatttccattaatattatctttcaaagttcaagtgctacctcatgccctattgggggagatttaagggttctgcttgggttttgaattcagcgttaaaccattgtttaactggcacaaggttgacaagaactccatttcttggagggagggagggagggagggaaggagggagggagggaggacaggaatggggaaggaaagaaaggagggagagacagactgtgtgattattactagcaattaaacacaatttaagaattattttctaacttatgccattgttttgtttccctgttgagaaatcacagaccaactctttaatgtatgtgacattttctattatgtcacaagtttctattatgtcacaagaactccagatatactctgtcctgagcactttccccctttaactagcccttgtgtgttttaaagaaaattcaagccatatgttgctctttcctctttgcatccaaatgcaattttactgaattttagcatggtccatgaaatgcaaattctgtgttttaatccataatatgtcccatgatctacacaagtcacatgacatgctcacatatccttatgcagaaaataagcatgtgaaaactgtagttgtatttttacagagatattttgttaaactaaagaaagccatgaagagaatggcagtatcaaggagcattttataaaattatcaaaaaatccagaaaatgtaacttaataactcatgaaaatatttaaacaatattgcgaagaagacattttacttgtgtttaatttgatccaaattgttcttccctgccacaagtaacagtcttttgtgcacatgggacacccaggctgtgctcataagtcacagaccccattatagaggcatcatttttaccatgtattcgaatatgttttcccatttgagtcgccaagtcttgtcagcaccttcacgggcagcatgtttttactgttactgcagatggatgcttaaaaggaaggaaactggagagaggagaggcaggcccagctgatctgcagtcaacccagaaagggttcataaataatgaaacacagagatggaaaagggaagagagggagggagggagggaggagggagggagggagggagggggagggagggagggagggagggaaaacaggaatggggaaggaaagaaaggagggagagacagactgtgtgattattactagcaaagcaaaaacacaatttaagaattattttctaacttatgccattgttttgtttcccctgttgagaaatcacagaccaactctttaatgtatgtggcattttctattatgtcactgatctgaccaagtcttgccataaaaacattctatatccttgtaaaatgttgtttagttggacaggatagcttatatcagtctcagcttcactccctggctaaaaggacaaggcctcagtgttcatccaacatttttgtgactttaaacttatgcaacttattttgtaggataaaacaaagtcccctaggaaaatacttaataaacaatgatatccacatactatgggtatctaggatatcataagtgatgttttatgaaattttgtttctaacaacaaatgtttatgaaatcctatagaaggaaagaggtctttagtatgctctcaaccttataatgcacatcaaaaaattacatgagatcacaccaaatatgaaccattggtcatttagggctgacgaataatgtcatcttgttttcatttgttataaattggttagattgtctactcttgtgatgctttagatttatagtaagaagaaagatagtaaaaataatctaggccatataataggtatttcaacaaaatatcacttatgttgttttgagaaagaatctcattgagctccccagcctttcctgggactcagaaccttctcccctcagttctcccaacagtgttattatagcagtgttccaccacatctgggtcaatgacttattttaaaatgtaagtctgacctggtgatgcaggcctgtaatctcagttacttaagaggcagaggcaggagtatagaaccttttaaggcctgcctgggccacagatccagttcaaggccagcctaagtaacttagtaagaccctgtctccaaatctgtcttcaatgtgaggggagggatgagatgattgaaatatgtttttaaatgaagagtagggcccggagagatggttcagtggttaagggcactggctgctcttccagaggacctgggttcagttcctagcacccacatggcagttcataaccatctgtaactagttcctaaggatccaaagccctcttttagcctcagaggcactcacattgtgcacagacatacacaagtcaaaacacttatatcatttatatacatagaaaataaaatttaaaaatgaaatgaaatgaaagaacaggaaaaacaactggaactgtccactccttgtgctccccaactgccttttgttctgtgtctttggccagaacccaggacaggatgtcatgcaggggcaaaaaacaatgggctatcacttcaaattttttgacacttggggaattttgcagaatggttaccccataaagtctgactaggactcattcatggctgagaggtagagcctggggtctgtggttcctacaaacccacaagtgttgctggatgccagaatcacacactgagaagttctgtgctaaaagattcatttgtcccaagctgatatctacagccaccttagttcataaataattttggacatcacaagaaaggtgtcacaattcttagctcttttatctaaaaactcactgacgattgtctgcttggcgcagtgctccccagtgatctcaggtactctctgttcattcaaggagaaacagaaaactccagaggcttccagaattggatcttttctcatcacctttgatcttaaactatgtagcctctaggaatgtgagaaacaatttaatgtagtttaaaattgacctagtctaaggtactgtcctgctgtctgtaaatattacagatataaactgatatgactagttgataccagtgtccttaaagatccaggctttccttcctcagagccacagtcatacattcaaatatctttttaggcttctagttattaactcctttatacctagttaacaagagtgtgtggaggggtttcagtgtctccctacagacctgaacatctgatacagtagactatctcttctgggaaaggcatatgcaaagcagacctagatagtcatagaagagaaagtgaaagctcaaatttactatggaccatagcatgtgcagatacagatatgttcatacatgtcaactaaggaagatgttttaaaatttcttcactctttcaaatagtattctcattttttaaaaaagggagaaagtcaaagtctgtctacaccaagatgtgatctgtgtcctctttgcttgtttttgctgcaacttggatgctgaaattggctctctggcagacacatcttacaatgtcagtgcaccatgcttagtctatgcactaatcactaggaagtggccacaccaggacacactatttagcttctatgttccaataaccagagagcaagaagcacctgattctccatgaagcacgagactagggagccacacaaaccaaatctcccccactgggaataaagcagtgaatcaaataaattgaaggtaaatggggtgattctggatgtggcaatccttcttatacctgaaatgagaacattttcatcatgattggtaataataaactgttcatcctttgaacccaaacctcatgtaacttggcaacaattctttaccttggatgttgtgcaatctctttattttattcatagataactgaggccagagtggtgtaagaagcttgcccatggtcacacagccaggatgagaggggagggatgagaacactggctcctccgacccactccagagcttctcactggaagggtttcctttagctctctgagtgcaccacacaaagcagtgaggtgtgaacacaaggcagagtcgcagagttacctactggagcagtaaaggcagaactagaccttctggtagttccagaggaggaggaagaggagaaggaggaggaggagggggagggagagggggagggaggggaaggggagggggggggaaggggaggggaaaggggagggggaggggcagtattgttcatctgcatctttaacataggcaatgccagtgaaggagctctagagctatctgagcactgcagaacacccacaagatccagtgcagtgtgcctgacaacttgatctctgatattaaacatcttaatctattcatctttgcctctccattgcctagtataattcctgggccatcactggcactttgttgctgttgtttgaaacaatatcttgctatgctgtcagtttggtcttgaacttgtgaggtctcatagtcctcctgttcagcttcttgagtagctgggtctaaagacaacgaacaccactgtccttagtaaagggttttttggggttcgggggagagaaaaagtttttttaaactcatgtctccactctaatgtgtagccaaaaaagtaaactacctactgaaatggtttgaagacaaaaacagataatcaaacctcagttagctgaaacagctaattgaacagagactcatggaggtccaactttaccaagtcatttagctggtcccaccagcctagatcagacaccaggctgttccagattgttttctattgctacgacaaaataccacgaccaaaactcacttagggaggaaatagtttctttcctctaacaggtcacaatccttcactgagggaagtcagggcaggagctcaggcaaacaactggaatcagagtctaaggcaaggccacggtggagtgcagcttaggctccacccagagtgggaggggcctcccgcaggtgatcatttgtcaagaaaatgccccactgactttcctccaggctgtctgatggagggattttctcagttgaggttctttcttcccagaagactctagcttgagttgagagttgacaaaaaactaaccagcacacacatcaatagaagtaaagcccagccccagttacattccatcccagccccactcagcctctgtctgtctctgtttcacatctgtaaaacagggagaataatatctaagtttaatttaaccaataaatataatcaaattgtgtagataatcaaaattggaatccatatttttcaaaatccagttgagaaatatttcttttatttccaacataatatttttgtcaattatttgggaatttcatacaatgctgtaggtggacttttctgccccccccccgccccgcagacactctccaaataaccacacagagacttaatattaattataaatgctcggccaatggcttaagcttgtttttagctagctcttataacttaaaatagcccatttctatccatctatgtgttgctgccctgaggctcctttacctaagtatatatttcccatcttgcttgctctgcatcttatggtgtctccttgagactcctcagacactgtccttttccttcccagcagtctctctgcccccaaaaccctgcctagccatcagccagtcagctctttattaaacaattagagtaatacatattcacagtgaacaaaaggtttattccataacacaatgcaccccaccatactcatttctcattcctccaaggtccaccttcctatgcttgaaacccacccctccaccccacccccgtcaaaaaaaatccaataagtccaatttgtgttgcccatatactcactaaagcatggtcaaactcccagtggtcagacccttaaagaaaacggagtccttcccaccccgactcctgccaggagacatcaactgtgaagagctctacctcagcatctttatcacagtttttaaggattgtcttcaatagcttcctgtctagactgtttcttttcttttgggggggcaggtgggctgtcacagagtcttcaaagtctctcattctcagttatgagtctgtggtcatcaataccactgcaaagaaagcctccctacccatagcagcctgcggcagcatgggtcataaacatccacatggtttccattggcagcatgaatctcagacatcaacatggtctctggtggcagtaccgatcatggaagtcttttgaggacacttaactcagaaaatgaccattcttcatctcagatattttttgttcagaaatttctttaaaaatatggggccagaaagatggctcagcaggcaaaggtgctttccaccaagccagatcacctgaattcagtcccaggcccacatgagatgagaagggagccaactttggcaagttgtcctgtatcactccccaactacagatagatagacaatagctaactatcatagctagacttaattctcagtcactgatactaagtataaatttctgctgtcaggtattttctttaactttaaaaaattattcaggttattttattttcaagagatttatgacacatagttaagtaattcaggtctgttcatttaaaactttaggtgaacataaagctccattgtctactgtttttgactgaagaaagtgtttttccacaaatactttaaaatatcctttctaagccaggcagtggtggcacacacttttaaccccagcagtctggagacagaggcaggcagaattctgagtttgagaccagcctggtctatggagtgaaggatatatctttcctaataaagcatgagatgggtatattttatttgcctcaagagctgtgttcctgaaacataaatataaatataaatgacatttttataattcaaattgaatagtgatagtccctgagcccccattatgtaaagaaattagtatgtgtgttaaaaggagaggatgcatagatcataccctatttccaatgacagcaagtgagtagcaagagaatgcataacagcagacaggcagacacatggctgtttgaatagtctgcaatcacagtgctggaccctgtttccaataaaagcaaaagtgagtagcaggagaaagcacaacagcaaacaggtggatgtgtggctgtctggacagtctgaaatgacagtgctgagaagaggtgcaggctttgaatctaatcagatcatcaacttccttcctgggaaacttctctgattgtgtctctcctgttgttctgagcttgcccagccttagctatcatcagatcgtcttttatcatttgatggaagtcccatcgttccctctgcctggcagtcaggtggaaccatctgtcctgcattagatggctacttcttaactcaaggattagcactgcactttgggactctttgggtaggttcaaatctacctaggtaaactgattaattttacttaccagtttgaagggctcacagctgtcttcacaactaaatgaggatttacacagatgctggcctccctggtggccaagaaggttccccaaactgcaggacttctggtactttggcaagggaggatggaattagcagtagcatacagggccatgccctctgagacctccacaaaatgcaaatccgatggggagtctcggaaggtaaattaagttgaggacttttggttccgattttcttccagctcttatttgaagaaatttgtggtctttttttttttatttttttacatgcacagctgtggagtctctcagggagtttcttgttctttttaatttttgcatatcagccaaaaaccaagatctaagcatcaactgtgatatgagaggcccacagatgatttgagtcgatttaccaaaggatatgagcttaggaactgcttaagctccgaggcaggatgctgacagctaggctgatgctgaaggaaatggcagaacaggtgtgatggagggctttgtttgcaattggttttgttatttctgtttgttttattcttgatgcggctctgtttgtacacacttggtgaagttagtggactgccaatcgtctcagtgacactggtgaaattaatcttcgttacataaaaaaaaatcagaagacaacccagattcagttttgatcttcctatttctagccatatggtcttggtcaaatgatttagtcccttatctctttgttaagttagtctaaatgagcagtgttatttactatgttttagatattaatagtgatagaaaggtagcaaagtgcttattctgctggtcactattctaaccttgtatgaaattgctcaaatttccacaaatccttcgaattctggctgctagatcacatttaatttgtacaaaaaacagagccaggggagctatataacatgcctagtgttgcatcacatgtgactgaaataggacttaactagaaagatatggggggagttaaaactttgcaccctaatttatgcttcaatattccctctggatctgcatttgttgagtctcaaagggtaagagaaccagtaagggcacttgctgcaaagcctgcctgcctgagttcaatcaccaggcccttgtaaggtggaagctgagtatgaactccaacaagttgtcctctgacttctaaaacacacacacacacacacacacacacacacacacacacacacacacacacacgagcacacacacactaaaatgtaataaaattaaaattctttgagaaaaatgaagagtatatttacatacagtattacattagtcctcacaagaaagtaattttgtgtgtgcagatgttcgtgtgtgtgtgtgtgtgtgtgtgtgtgtgtgtgtgtgtgtgtgtgtgtgttgtagaatattattttaagatgtgttacatttgtttatgctgtggaacatttatttaatgatgcaaaatatgttgcattcttttatgttgtatttgtttaactctgtgaagctgtattactttgcctgtctaaaacaccttattggtataacaaagagctaacctgtcaatagcaaagcaggagaaaggataggctggtctggtagacagagagaataaatatgaggagaaatatggaggaggcatctaggagcaagagaaggagaaggactccagggccagctacacagctacacagcaagccacgaaataagaagtaaagaaaggtatataggataaagataaaagcccagggacaaaaggtagacaggataatttaagttaataaaaactggctagaaacaaaccaagctaaggccaggcatttaaaaggaagaataagcctcagtatgatttatttgtgagttgggtggagggttcccacaaaagaacaaagagccaaaagagtacaaaacaagcaagcaaacaaaaaacactacatgtgtgtgcatcacatacacatatgtacaagtgccccacaggacaaaaaggcatcagatcccttggagctggagctataggctgttgtcaacctcttgatatggatgctgggaaatgaattcaggtcctctagcaagtcagaggagactcttctgaactatctctttagctatcccaaatgtaatgtttaatgtttttattaacaaggaatgcatagttcacccaaaccttcatgcttacttcttcacagactagttttattctctctctctctctctctctctctctctctctctctctctctctctctgtgtgtgtgtgtgtgtgtgtgtgtgtgtgtgtgtgtgtgtgtgtatgcgcgtgtgcgcatgcatgcacacactccttttcctcccccccctttccctctctgttcctttcttcccaaggcctcatgcatgttgggcaagtgctctaatacaaagctacaccccaacccttatttgtttacttgtttagaaaatgggatctcaggtggtaggggaggaagggagggagaggggaactgggcttgtcatgtaattcaatcttgtttgtaattcaaatatataaaaaataaaaaactaaaagaaaaaaagaaaatgggatctcactatattatccagtcttgaagttgtgatcattcttcagcctcctgagtactcagattgccatgtgcctagtccttggtattttaatagcttctctctgattataccacctcctgactttccctgtgagtcttcatgatgagaagaaacacagtacccacctgacgcatggaaagtcatttccattttccacccttaccacaaccttcaggaatctgaccctctctctgcctccacttagtgtcctcctttgtgttgactcttcctgccatggtttagcaagcgcagatctcttttgctgttggacttaacattggaaactatcattttgtattcattggaaacaaaacatctcttgcatttctatgtcttccttgcccagctccttccatcagcctagtctcagccaccattttgtttaatctcttagacaagtttagtcttccttaaaacgctctttgccctttgttttcatgatatttgttaacctcatttccctccatttcctccttctccttgcgggtcctcctggaagcacagggctctgtctggtttgtggctccgtgctgtatgagccaccttattatcttttccgtgtggctgcagattgtcacctgtgctgagggttcagcttcaagatccctctctagctcccacaagctcccttcccctcttgatagtcagtcacatttatatatgcagctgccttctggatacttaatctaaactggtttactatgataactgtgcattcatatttccccaaggctgctgctgtataccccattttaatggacagcagtgtgatttttctggggtacaaacctagatatttcatactagtctgagttccttaaggcaggagtgggcctgttgtgtgtccagcatttagggcaaggcttgatattcagtgggaactcaacatatatttaaggaatgatttaattacttctgactcaatacatttttttttcagaattcagatctagggtttgtgaatgctggacaaattctctgcccctagccacatccccaggcttaagtaattttgtagccactgttatttaactgctgttaaaacaaccctactaatagcttaactattaattccttctatctcccagctaaaatatttttctggtattggttaaaattactgtatttatattgcaaatatgactagatatgcactcttgttatttttgtagccttcagctatcttaacattggtcttgattgcagcaaacactcaagtatattgagttttgattgaagttataaaatttatttgctagaggtatacaaattacccaaaagctgaattttaactgtatgtacagtgtatataatcactagaggatgtgtcagtgtaagacttccttagcttctgaaatcatcactcatatgtattgtccccaacactattgtgtaatgacaaggcaatgtctctgatgataggatatgtatacacaaaaaatggagttcctgcaggaaaagaagaacagtgaaaggagataggaaaggagagaactataaggggaagaagagaagaaacaacacagaatctgaatcataagaagtagtgtcatgagtttatttaggtagtggcatgccttgcaatggcagccagaacagagacagccatcgtgatgcctccagctgatagatttctgccaagactctcccaagacttagactccacgcagccaatgtttgttgagcttctactgtgtgctaagaacttcaaggggaaacctcccgaaagaactgtagtgtggggggctttatttgccttccaggaaggtttctcacctacctgaggcctggcagaatctttgagaacaaaccatgttctacctgctctccacaactcttgctgagttctgatggactcaactcttagagttgggaagtgaagtcacaaactagatcaagttcagagctgcctgccttcctaaatgtacatttttaaaggatttgctaatttttctcttagcaccaaatatgttaaatttgataaacaggagtctgtggcgagacacgagacggcgctatcaataatgcggttgtttttcacaaagcactccattacacttgtcatttgaaaatgaaaggcacatttttgtgtgacatacagaacaaattgctccagacgaataaaacacctgggcaactgatgccgtcagctgggtgccttcaggctatctttattttgtatacagtttctcttcaatttttcctcttcctttttagaatccaaattttatatcttaacaaaacttagaaggcatctacttgtcagaaggccctggagatcatttgaaactcatggtaggctttgtccactaggaggttttaagggctatgaacttgtgtggtcttttccgtggcttacagccacagggaacaaggcaccccatttccaggcattgtgaatgagtaatctaacttcacccaatcccagatcagaaggcagtatgttttctaaacattgatctcagttctgaacccactgaagtttggaaatgcttattgaaacacctgaagccccgaggcagaggccctctctgaagaagaaaaacagcaggaatatttcatgtgaaaggaattttccagggtacatattcagtttcccaggcccatgagagagttcacatttacctccagtttgtcttttgagttctattggaggaagagtgtcaagaaaattgtaaatgttacaaacctgcttgcctggcaatagcagcaccagtctctggaaggcaatgagatcctcttggcgaggagctggattgcaacacaacaataacaacagccaccaaaaacaactactgggtcctactgtgcttgaatgctggactgagcatttcatctggattatcgaactttacatggcatcactcttgaccctcatgctatttatagaaaaggaaatggagatttcaagaagtgtccgtcaagaccatgcaacagtaactggtagcagtaaggatctgaacacatgctttttatttcaattttaaataatagactatgttagacacaacatttcacagcaagtttgagcagaaaataagagttgtctctgccccctcacacaaaaaaaagtcatgtacaagagagatacatttataatgatcagtaaacgtacatcagtaaactatccctcagagtccatagctgtcatggggttcaccctttgtggtgcatattctatgggttttgataaaagtactatgacatgtgtctaccattacacgaccatactaaataacctcactgaccaaaactaccttcgattttccctattcatcattctcttccctttaacattgggcaagcactgatcttttcacagtgttcttagttttgtcttgtccagacatcacagtgtcagaagtgtacaagtgtggtttttaattcctagattggcttcttttgttcagcattagacatttaagttttccctatgcttctttttggatagcatcaagacttgctgatttttaatgctaagtaatattcagttgtttggatgtgccagtgatgctgatgtgtgtcttcaactcatctgtgtaaatatcaaggaataatattgggtcacatgaaaagagttgggggctgggtcattaaagcacctaccatatagacattaggatttaaatttggatccccaataccccacataaaagctggtctaccctcatctgtaactccagcagagagacagattcctggaacttattggccaagcagtgagctccaggttcagtgagagtccatgtctcagaaaataaactggagaacaattaactaaaataggttacatccacctatggctttcagatactagtgcacatgtgcatcaaaacttacacacacatgtgtatacatctctctctctctctctctctctctctctctctctctctctctctcacacacacacacacacacacacacagtgcacacagtatatatttagtttactaagaaattgctaaaaggtcttcccacacagcattttctattcctattaatgtaattgtaaatactattttttctgttgggtatgatggattacagtaattgttttaatatgttgaaccaggcttgtatatcttagataaattctatttgatgatggaatataaagtcttttaacacatcagtgtatttaacataccaaaagctttttagtttttggtgtctatgtttataaagtacattgttctgaatttccttgcaatatatctgtctaatattggtagagctgacctgttttgttgagtaaggaaaaagtttaccctgcttttcttttctggaagaatttataaaaattgatacaatttctaatttatgttattccttaaatatctgttagaattcactagtgaaactcctaggtgggtgcttctgtttgggaaagttgttgaatattgattcaattttttaaacaattgcagactgttcacattgtatattgctccttgtgtcagttttattttatttcaaggaattggttcatttcttctaggctaccaagcagagttaggtttagttttgctttgttttgattttcttttctacacatacccaataagtaatatattagagcatatagtaatattagtgccattttacttactaaaatggtaggcatttaagggatagttatatttttaaagattctttttattatttctcattccatgtatgtgcggagtatgtacgtgtgaatacaggtgcctgagaagccaaagatatcagaacctcctgggcctagaattacttggtagttgggagcctcctgtcatgggtgctagtaaccaaactcaagttctgcaagaacagaacacactctgcttggtcatatctccagcctggtggtgattatctttatagctcactattactgtactttcataatggacccactctttggttgagattatttttgcaagcaatattttaatttcaaaggaatgcagaggaccaagactaatagtccaatcaccagtctaactaaggaaatcaacatctcaacactaatgaagcaagcaagtgtaaggaacagcataacaatgtaagactccatgtgacttgggatatatacacacctctcacctaataatgcacttgacagtgtgaaaccttctaagttctatgcatatacttctctgaacaatggtactagcaacctaagacatgacccgcttgcatcaaattgcacatacaccattctctgaaaaactgagtatatttctttccctttaacaacagtcagacttagattctatttagttgtaccctaatttgtccatttatgaaggtagggggtccaattcaacttaaacctaattgggaagtattcacaataaggagaattgtttctcaaactgaacttttaaggggggatctcctatttactatcttatacctgtgcataactgggcatgcatattgttacaatcaaatgcttgtattatgggaagggatatgtgcaatagagaaatggttctataactaaaacctgccaatcaaggcggggacaaacccaaactacataccttagaaaaaaattcttccttctcttgaaggagaaataaaaggaaactccaaccaataactgggctcttgcgtttcctaacttgttacttttgacagcctatttatttctgatctctactattcctttgctctgaataaagtattcttgctaccttgcaatttttgtgcactttatttaattcttgaataggcgatgacaccaacttgggaactcctggctcagactctaacacaacaacttggtcccttctgagcattgcaaacactttttctgaaagaatgaaggtgatttaaaaataaacaagtccattcaacaatgtaaccccagacacacaagtcccaatataaaagcacaaattacacaggaaaccaaagcaatataactcctacaaaaaaaattactaattctatagtaatggcctctggtgagagtaaattagatgaaactccagacaataaatgcaaatagatgtttgtatgttcaaaaaatcacgaaagattataccaatacattactcaacaaattttagacaatacacacatctggatgaaataagccaacacaggattttaaagaagaattcaataaatagaaatactgaagaaaaatcaaactgaaatactgaaagtgaaaaaccacattaaaaactccatgaaaaacctcagcaatagaatggaccaaaaagaagttaagaagtcagcttaaaaccaaggaagaggaatcggaacatgcaaacaaggataaagataaactaataaaaaagtatgaatggtattttcaagatgtatgcaacactatgaaaagaccaaatctaagaaccatggccatataagaatttcatttgaaaggcatacaaagaattttcaacaaaatcaaagcagaaaatttccctaacttgggacacagataccaatccagatacttgaagcatttggaagcagactagaaccagactagaccagaaaataacctccccacatcataccatattcaatatctagtatacacaataaagaaactatataagaagcagtaagagggaaacaccaagtcacatataaagacaacaattccagcagaaaactggtgccaaaagagcttgaaatggtgtagtcagggtctgaaaagtcactgccaacaaatactactctacctagaaaacctattcttgtgattgaagatgaaagtaaagcttcccagagtaaaatccgacaaaataccactaagccagatctacagaagaagatacttgaaggattcctttgaactgacaagggatcaacacatccatgaagccataggaaagaataaaccgtgctagaataatagctaagcaagagagtgataaggaaacaccagccactacaaattcaacagaattaacacagcactttcaattctaaatccaagtctctaatcaaaacacacaagctagcagattagattgaaaaactatccatttgttgtctccaagaaccatacctcacctaaaggggcacatgaaaccttagggtgagacaatgggaagaggaactaagcagtaaactaggaatcaagcaggtgtcagtgtttgactatctggcagaatagacttcaaaaaaaaaaaaaaaaactaggcaaaagaattaaacaaggacacttcatactgattaaggtaacaatctctcaagagcatattataatcctaaacatatattcaccaaacatggtgcaccccatttcattaaacaaatattacaagatgttgagtcatagactaaccccagaataataataataataaatgacttaactatcctatccttaccaattgacaagtcatctcagtaaacaatagaggaacatctgaattaaataatatcattgatgacattgacaggcatctacagaacattctatgaatacagcagaatacacattcatccacagaactttctctgaaatagatcttataataggacagaaagaaaattttaacaaatacaggaaaattgaaatggtttattgtagtctatatcatcagagtggaataaaactacaaatcaatgtaagaaaaatgccaaaacatacacaaaattacggagattaaacaacacattactgaaggatgaatgggtcattgaagaaaccaagaaagaaataaaaaaaattcctagggtcatttgataaaaacaaaaatggaacctactcaattcaattctgtgggatataatgaaaccagtcccaagagggaactttatagccagcaaatatgtacacttacaagtcacagagatatgaaattaacaacttaaacatgcaattaggaccttagaaaaagcaaaaccaagcaaaactcaaaaacattaaaaagaaataaatagcaaagattagagcagaaatttttgaaatggaaatttttaaaaaaattaaatcaatgaaacaaaaatggattttagaaatgataaactaaaggaagaaaaataagacacaaactaataaaataaatgaaaaggagccattatgacatatgccgatgaaattcataaaaccattaatacactttctaaaaaaatacatccactaaactggaaaaatataaaagaaatatatgaatttacagatgcatacaacctacaaaactaaaccaagaagagatgtcactaaaacatatttacaacaagcaatgagattgaagcagtaatataatatctccagactaaaaagtccagatccatatggattcactgctgaattccaccaaaccttcagagaacaccaatacttcttaaatcattacataagataagaaacattaccaaactccctttacaaagacagtatcaccaaatcaaaattatatatcagcacaacatagaaaattatagaccaatctacctgaacataattacaaaaacatattcccaataaaaacttgtaaaatgaatctaagaacacattaataggttgaagagacagctctgtggttaagagtacttgttgcttttgcagaggacctgagttcagttcctggcatggtggctcacaactctccataactccagttccagggaatccagtgccctcctctgacttctgcagggactaactgatcatacatggaatactaaaatgagatatttgatccaaaagatgaaaacacttctttgttatttgatgtataatttgcttttcaaagagattcaacaaattgatgctgctttttatttcaaagttgtgaaaattataatctatgacaataaatatgtatataagaaaggcttaaaattaaagatggtaccaagacttaagatcctcagaatgcctggtatagaataactgagaatgttttacttcatctgtaactgtctatcaccttgcatatgagctcccacgttatggagtaacatggattaaaagcattgataattctccatagaagaggaggtttcaaagtcttccagaacaccaatatagtggtggaagagaagattgaaagagactgcatgtgtgtaccacattcctgtctaatttcacccatgttctggactagatgttgggttttacatctcatcacctcttgtagcgatattatggggtgaacttgagtatggcagcacatgcccataaccccagcacttagaaagctgataccagagaatttttagtttgaagctaccatgggctacatagaacgtttccaggtcagcttgagctgtatagtaaaaccctgctgaaaaagatgaagagggggagaagagaacggaagggaaggaaggagggaaagaggagggggagaggaggaaaagcaaagagaagaaaaggaagggatggaaggaaagagggaaggaggaggaggaagtaagaaagaaaaggcaagaagggaggaaggagaggacaattatggagttgaaacttggaggtcagcattattgattttcttctctgtgcatagaactgacgtgccgtcatccctcaaatacattctctgaagaggcacacattatcaaccttccattgacaacaaggtgaaggtgaatcaccaaaaaacttagcgttgacaaaacataaatgtcttgcaataatttacagggtacaagtttgaaaacaaaagacacatcgaagtaatggagctgaccactccaaaaatactgggggagaattttaggtttgggttgtcagggttttcttccttttcttttctttcttttcctttccctttcttttttcttcattcctttgttccttcattcctttttttctttctctcttccctttttcctttgttccttccttccttttttagatgggtctcactatgtagctccatctggcctggaatttactatatagacaggctggcctcaaactcacagcaacccacctgtctgctgtctctggccctcccaagtgctgattaaaaatgtacccaaccactcctggctagaattttttaaagttctttatttgggggaagtatagtagacgtatagaaatcaagattcactatccaagcatctcactgtgtggcttgtttgtcttcttcttcttcttcttcttcttcttcttcttcttcttcttcttcttcttcttcttcttcttcttcttctttcttcttcttcttctttcttcttcttcttcttttccatagggaatagtcattttattttttgttgttgtttttctttcagtttttttgaattagaaacaagactgttttacatgacaatcccagttcccttctccctcccatcctgccctaccaccacacccccccccaactaaaatcctacctatcctacatatcctttctgctctccctggatgatgaggccttccacagggtgtcatcagagactatcatatcctttgggatagggcgtaggtccacccccgtgtgttttggctcagggagtatttctctatgtgaaatgggctcccaaagtacacacttatgctagggataagtactgaactactacaggaggtcctgtagatttccaaggtttcctcaatgaaatccatgttcccagggtctgggtcagtcccatgctggtatcccagctatcagtctggggagcaagagttccccgatgttcaggtcagttgtttctgtgggtttcaccagcctgatgtggacccctttgctcttcactcgtccttctctgcatctggattccagatcagttcagtgataagttgtgggtgttggctctacttccactagctgctagatgagggctatcaggtggcatgtaagtcagtcatcaatctcattatcaggagagggcatttaaggtaacttctgctctgttgcttagattattagctggtgacatctttgtagatctccagacatttccctagtgcctgatttctctgtaaacctaaaatgtctccctctattatggtatctcctttcttgttttcttctattcttcccctgactcaacctttctgctccctcatgtcctctgcatccctcctcttctccccttctcattcttctagctccctccccccttcctgcactctcaatttgctcaggggatcttgaccctttccccttctccaggggaccatgtatgtctctcttagggtcctccttgtttactagcttctctggcagtgtggattgtaggctggtaatcctttactctatgtctaaaatccacatatgagtgagtacataccatgtttgtctttttgtgattgtgttacattgctcagaatggtttcttctagttccatctattttcctgcaaatttcaagattccatttttttcccgctgagtagcactccattgtataaatataccatattttctctatccattcttcggttgaggggcatctaggctgcttccagcttctgtctattacaaatagtgctgctatgaacatcattgaacagatatccttgttgtatgaatgcccttcttttggatatatgcctaagagtggaattgctggatctgtggtagactcattcccattttcttgaagagtcgccatactgatttccaaagtggctgtacaagttggcactcccactagcagtggagaagtgttcccctttctccacatcctctccagcataaagtgtcattggtgtttttgattttggccattctgactggagtaagatggtatctcagagttgttttgatttgcatttccctgatggctaaggttgttgaacactttcttatgtgtctttcagccattttagattcctctattgagaattgtctatttagttcggtaccccactttttaattggattgtttggtgttttggagactagcttcttgagttctttgaatgttttggagatcagccctctgtccgatgtggggttggtgaatatcttttctcagtctgttggctgccattttgtcttgctgcattctataaagaaaaatctctcattagacctaagacttttaccctacagtttctttgaaactctaaacctcctaatgtagtctgataaaaagttcttataactcaagattatcaagaacattttcaaaagtaaaattcaaaacattctttggcattatctgtatctacttttaaataagtgtgaatgaattcacacatagccagaattattatataataaattctatcctatgttatagggagacactgtagccctgcctcctagtggcctggacaggtgtgccaggacatgcccataagggcgtggtcaggggaggtctaaaggtgacgcatgctctggcttgcgcttggctggtgtttatctgaataaagaaatcttagccttacggactgcagatcgatctcttcactatgtttttcatttctgtgatataaatgggccaaaaccaacttagggaaggaaaaggtttagcttacaactcatcattgatgaaagcaagacaaaaactcaagcaggccagtaacctagaggcaggaacttaagcagagaccatatactgggcatggtggtgtatgactataactatataactataactataactccctcactggagctgcatatcaaactcagggcttcatgaatgctaagtaagtattcttagtaagcatccctaagtgggagggctttccatcttccgaggtcttcatcagttttttcttccattttttcaaaaaatttcactgtacaagtttcttgcttctgtggttaggtttattttaagatatttaatttgcatgggaacaagttgggcccatcaaacttaggaagtcacagtggctgtggtggtctgcacaagacagacacaagataaagctagtctgaattccagcatagatgttagaagggtttgtgaagtcccacccgtagctgaagagatttggcagctgaaggccactgggatggaaagagccagctttcttcaggaagtggcacctgttggacaggatgcccatgctacagtgggtgatcctacacctacctacataaggaaggatgcccaagctgcagtgggtgaccctacatccacctacacaaggacagcactgactggatttgatgccatgtgaaaagaaaccatgggagagagtatagtgaaggggtctagaggagttaaaaaaatgaatagggtttgctatgatcaaaacactatatatatcaaacaatcaataaaaagatacattgaccatagaagtttaagtgtcatgattaagggttggatgcataaccactaaaataacatcataaaatgccacatttgctgttagcaagatgccaaagtatttgaaatgagctctaaatcaagaaatttaaaattccttacccctcaccccttaatgcccgctatcaatgagagaaatgactctccccgttaccaattgcagcactcaggaaactggtcctgccctttgcctaggcagcagaacagagctgccaggtgatcagaggtgagggtgacccagctctgatgttatgagcaaaggagagaagtccccattgttcattagatatgtggtagcataggtggcagagagatgcccctcctacccttaggcctcctgcctatcaatacctgagacaagtggaggagctgaccttggggatcataagagcaggagggctgctcctacctctcactagctgcagcattcagaagagtggtccctgtacctcccctgggcaacacaatagagctatccctaatgatgtaagtgaccctgaaggcatgaaagcaggagaactggccccacccctctcattgctgcaagaggtggtggggccaggggagaactggttggaggaccaatactacagctgcccaggcccagaaccagggttatgacttggcctgccccaatgtccaccccatctaagatctgctgggacacgtgaagagacctgacccacagacccaaagctgcagcctctccacaatacagggcaacaacacaatatccaagaagagtcctagtgagagcccagcatcgatagtgtggtagaaaccagacacctcaaaccagttaagtgactctttgcaatgaatacttacaagtaaagatgtatgaacaaagggatttacttcgtgactcaccatgtcacactgcagcttccatgacaaggtttttaactttttcactccctccttttttcccttttcccccttctttctcttaaaatttgttttattttggggagggtatggggacccaagggcagatgtgaaggaatgcaaaaataaatgagatcaagatatatgatgtaaaagacacagaataaataaaaagagagaaaaaagaaatttaaaattaaggaaggtgtttattttctggtaacctattaattaacaacaattttatatcttggtaccttccaaggaaaaagactaaaatagttccaactgaaaaaggcaggaaactttctctggagactccatacttgagaaacagagcacccatgttctgtagcctagggatgtggttcttacccaagggaggtggttcttatcctagggatgtggttctcacccaatggatgtagttctcaccccagggatgtggttctcaccctaaggatgcaattcttaccataaggatatgattcttagttctctccagtgatgtgacttcagcatccaggatgctgaaggacaggtggtacagatctgtgctgaaagaatttctaagaagttcatgaaaataggtaaattacaatagtcttgattaaagttgctgggtggccctggctattgatgctccccgagtgagtaagaactgttataataatgcagtttgggatttactctgtgttgggaagcaccattgatgttgtgagtattatttaccactctttgttctcacacctctaaggtaggtcctaaccttacctgggcttagaggcttccattccccacagtgattgggcagaacctcttgttgaatctatgctatctagctgcagggcctttccccttaactttgatttcacagaaccaccctgttcagtcactaggaaagtattaatcatccctgaaagaacaccgcaccagagccctgttcgtcaccaccagctaagcaaccatagcatcttcggcaagagattctgagttttataaagtacctcattcttgccccaggcataaacactgaggagggggggttgctaagaaagaaggggggcctctttccactgcagagctgattaatttacaattagcaaaggcaaaaaggtccctttctgaaacatatgcttggggccctacacagaaaacttagtcattgagttctgtctctttgaaggggaaagacaatccatcactagaaaagaacacctttctagaactcaaaccttcagacatcctttctcataaataacatatcactacagacctatgccatcacagtttgtctatgaattaaaattttagaccaacgtaatggaaagacctgcttcaggagacccctcttccatctctttccgcttgatctgcattagtaactatttctcactcatttttgattcatcttgttagagtttcattttgtgatgttactgtgccttctcatttctcctctttaatgcctgtaagataatgcacagcatgcagtatagacccgaatctacgtctttcctacagcttttaaaaataaatggattcatagccttatgtatctagatattatacaaaattcttccttcttattgatggaaataatggacgatcacaatcatcctattgtctcttgattactttgaactgttacataaatggagaagattgttgctagtgaatcacacacacacacacacacacacacacacacacacacacacacacacgaactcattttcagtgatgatatgacttgtgtttagtttgataataaaaggttctagttaacacttgtctgcttttcatgggctccacacttgttcctgttcttcagcctcctaaaatcatttgtaggtaatcaccagtaaacaatgttttctcactctaaaacacttgaagcaacagctgatggaagtggaagaagaaatggatattccacaagtgtatatggagccttcaacactcaacccaaagtgactgtcaatgaagtagacagaaagaatacccagaatcagctgagctgaagcttggcttgagtgatgacttctgcttccttactggggttgcagttgctttgatgactgtttctacactggagtatggctgcactgcttaattttttgtcaacataaggcagagttaactgaaaagtgtgaatctcaactgagaaaatgcctctatcaggttggcctataggcaagtctgtgagggcattttgttcattagtgatggatgtaggagagatgagcctactgaggctgtgccacctgggcaggtgggtggtgctgaggagtataaggaagcaggctgagagagccatgaagagcagagtttctctgtggcctctacttcctgcctccaggttcctgcttgagtaacccagaagtacaagctaaataaaccctctgctgaatggtgcatattaactttggctgctgctgttctgtagaactccatacatgtgtactgtggatggttcttcctgccagcctggtcccactgacgccatcagccccaagtaaatgctagattaattatgaaactgttggccgatggcttgggcttcttattggctagctctgttaacccataaccactaatctatgtatttctacatggtcttatcttaccagagaatgcctaactcatgacctcgcttcctgggttcacatgtagactcctttatgtctatattttttagaattctcctcatctcctagacccacctatcttcctgcttcattagctgaacattgtttcattcatcaaacaataagagaaacatatgcagaaggacatcccccatcatctcctcttttctgtctaaataaaagaagggttttaactttaacatagtaaaattatatatgacaaacagttattaagcaagaactatagttaacaatagtctattaacatttggcaaaatttaaagaaaatattctatcatttatcctacttttgcgagtctaaagttttatatgtaacttatcttttaacataattcaggaaaactataacctaactatctatctttaactccatcaaagaccacaggaggataatacgtaaactatagaattgacagggatatctcactgcctggacagtcatccaaagttcctctgtaacgttggagcatctatcttcagccaaagtgtgaacatagtgtgtctggcagacttctcagtgaagcaggaaatttaaaactgtctgcctgtattggcagtttgttagtcatttgttttgtgtcctaggcatctggtttgtgaacctgtaatggtggccacacccttttgggtgtggcttcaggcagccggaagtggaaggagggaagcttgaggcatggcttctgtttgtacgctcttcatgttcacttcccaagttgttctgggtcaaagtctttattacagtgaagaaaaaaagcaagctaggacagtggtcttcagcttctgataggttgagaacgtgaaaacaggagactatgaaagttctttcaccacagcctagggtatgaaggacatattacaaaatcagccaatgagtgacttctagagtttagatctaagttgtccaagtgtccatactctagtgtcttggtcaggatgtgacatttcctgagggacagttggactgttgagagcaggagcttagtggaagggaggtgggtcatagagtctgtgctgttgaggtgatattgggatcctgacctctttctttcctcgatgagaaatgtagaaaatacatagattagtagttatgggtgaataattaagagagagctagccaataagaatcccaagccatcggccaacagtttcataattaatctagcatctgtgtgtttatttggggctgatgcagcagtgggaccaggctggcagaaagaagcatccacagtacacatgtatggagttctttagaacatcagcagccaaagtcaatttgtaccattcagcagagggttttcctcttcatggccaccaggaagtaagtaagcattcatccttctccataagcttcccacacaatgtactgaaccatcacaggcccaaagcaactgagcagagtaactgcagactggagcctttgaacagtaatccagaaagaaaccctactgaggttgataatcccaaatgttttgtcccagcaatagaaatccgagtaactaccactcttaccgagactgtagtatttttcacgaatttcgtggttgaggacatttcaaatgaaccacccccccacccccacctcacccccaccgctgtactcaacatcttctctcttaaagagtaaggagcacccctagtgcaactggactgtaatggcctccaagggcatctaaggaattatagttgctccctcctgtcatgtcttagaaatcaccaccaaggaccctgaattccatcaagaaatgaagagttcttcctttaatcttgtaggaaatgcagtggcggaaatgccccagacaagaatgctccctgcttacatctctagctctggtgactgcagaaatctaaagctcccctctaaatcactctggtctaaggttttacatttcagagcctttccacttatttgggcaatgaaaaggactcatgacacatcttctcctgttgctcccactgatggacaaagatcaagtgccagacctggaaccaattttgggagaacatgagtgctaagctcccaacaggacaactgatgaatagcaggctctaacctgagaccatcagatgtttaatagtcaggcagagtgagtcttatactatgcttgcaagaggagaggagtgagcaaagggataaatattatatgagtctggttgcactcggcaaatccatccaaaggaggagttcagagctataaattgggaatcgtggaatagtgagaagccacagaatgggtgtgtattttggccacgtattcttagagacaagattactttatcagtttctattgcatgacagtcatgctgaaaaacaaattgctgacaccctgaacagcttatttgcataactttttaaacactggatgggctaacttgctttcttttttaaacaatctttttaaattttacatactaatcccagtaccccctccctcctctcttcctgctccccccacgcgccctcccaccccctatccactcctcagagagggtaaggcctcccatggggagccaacaaagtctgtcatatcactacgttgaggctggaccaaggttctccccgctgcatctaggctgagcaatatatcccttaatagggaatgggctccaaaaagccacttcatgtaatagcaataaatcctgatcccaatgccagtgtccccctaaactgtccaagccacacaacagtcacccacattcagagggactagttcggttttatgcaagttccccagctgtcagtctggagtccctgagctcccactagcttgggtcagctgtttctgtggatttccccatcatggtcttgattgctttgctcatattatcactcttccctctcttcgactggattctggaagctcagcctagtgcttagctatgaatctctgcatttgcttccatcagttactggatgaaggttctatgctgacaattaatgtagtcttcagtctgattacaggggaaggccagttcaggcaccttctctgggctaactttcttacatgcgtttgaaaatggaaataaagacacatgtattcagcataataaatggacgattgacttttatcacttctaacaaaataaggtatgtgtaaaaacaaaggatggagggattgtgtcaagagactgcagtcaggtgggactacttagacttccacaccactggccttttttatcttaggaaaaaagatgagacctatactaactaccataaaatgaagactcatcctttgagaaaggaaatttactttttctataaacttgaataaatatgaggaggctaaggctttatctgtgacacagtcattgttcaaaatggaacatactggatgtcgagatggagatggattactatggactggctgccttctgcctttaaacacacacccgtgatattgatgagcaataattcagataccacaggatgataatcaaaaggcatgaacatacctagaggccccaagagcttttcataactgtgaagccaaagaagctaagcttgtcagccaaaatcttagtgcctgatatcacttccaccataaaccattttgttttacatggcctacagaatcaactaagtagggtttgaactcatagaggctcacagagtgaagccacaaacacagagcctgtataggtctgagctagggcctccgcatatacgttatggtagtgtagcttgctgttcatgtgggattcctaacagtgggagtgggggggggtgtctctgactcttttgccttctgttgggacccctttcttcctaatgggttgcctccagccttgatagaagggtatgtgcctagtcttttagtaacttgttatgccatgtttggttgatatccttggaaaaacctcctcttttctgaagagaaacagagaaggagtggatctgaaggagaggcaaggtggggaaatgggagagtggagagaggggtggctgtggtcaggatgagaagaatttaaaatttttttaaataaaaatgttttaatttttagcttgagtttataaaatatgaagaaaaataaaagatagtttttgcccaaaatctcactaggtttgatgctattggagttttgtaatagtcagactgttataatctaggccccagcacttcattttggctcttgggagattaaccagccacttgaatgctgatttagtgcttaaaagactaaagactttaaaagtcatgggctggtagcttgcagagttttaaaaataaatcttcctggctgtgacgctaggtagtgcagctgcatatatttactaaagggccaaggtttgtggtcatcccaaacaacttccataatcgccaaagtgatgatgatgccttcaaatgtgttacaaacatgaatgctggttcattcacaaaaatgttagcagagatcctcatcactttactatgaatccatatgctccattctcattggtgcaggatgaatacaagtcgtatagtttgttactagataggaaatttgattcacaaataacatgaaagggaaatattagttcatggtgctgatgttacagatgattcttacataacaacagaagaatctgttgtagtccttgtaaatatggcaggaaacctactttaaatatcattaaagaaccatcctacatcatgggggctgaagagaaagacttaacgttaatttgcagaacaaaaccagtccaaactacaaacaatctattagcacattaggcaaggcatggctttccccttagttgctcctacctcaggaagccaaggccttcttgcagcttccctccttcctgtcaccagccggcccccaaaccctttgcacctggaccctggttttgtgtgtgtgtgtgtgtgtgtgtgtgtgtgtgtgtgtgtgtgtgtgtgtgtgttatgaaaaggggttattttgccacggaaaggaggactttcatgacttcaaacatggacattagatcaagtttttatcttccttcataatcctgtctttgatgtcaccagactgaaacctctcagaataaaaggggagagctgtgaaaagaggcctagttaatttatacgtgtaagtgctgcggtcctaattcgcctgggcagcattttcattgtcttctgctttgcatcctaaaggcaggcttacaccaggcaattatgaatggcccctctgaacaaataattgaaattcacaagttgtggagtatgggtagacaatgtctgggttggaggtgtgaggtcagacgtattcccttgggcattgttaaagttgcaggctcttctcacaggatcctatttgtcttacattagttttaatggcaactaatcaggtgaactgcatgtgctgaagacagggatctcagggagcaatcctcacaaagcagccgggagtctgggctcatttgatacgtataaacagcaaattctccattaaacacaggacgccaacacaaatacacgatctcagaaaaaaagaatggaaaatgggtttaattttgcaggaaaaaaaaactctactgagctttgtttcttaattctcaaagttcatttttttttattttaaatttccacatagaggattatgtggcccacacaggagatcccagtgaatgtttgaaagagagcatattcacacatgtgcattcgtacccacacccccttagctgactaattatggactaattactccaagccaaattctgccctctgctgtgggtgtccaaattagttaatgtgtggtgtgttctccaaggaagagatctttgctgccttctagaagtccagacagtatctgcattagcgggagaggctgttctaaagtagaattcagcacacacccatcagtgatcagtaaaccctgttcagcaatgtcttttaaaaatctcttcatagggtgtggggatgttgatctctgaggttgtgtgaccacttggagtctaaatcaatccctgtcacatccttatgaacaaggaaaatgtttatcaccagatctgttgttaaggaagaggaagaaagggagggagggagggagggagggagggagggagggagggagggagggagggagggaggatgaacagttttaccatcccccctcctgaatttccagcagaggaaaggtaaagctatcagtgtaaactatgtgaccgcagcatctgatgacaataatgttgggttggaattcctggaagattccagagttctccagctctacctgtctgaaagtctcccatgcggtctgttttccctggcaattagctgtggagataagttttagagcaatgaaagagatgggctcttctctttagtactgtaattaataattgagtttctcatataaaatctgcccccccctttttttttccttacagaaattgtttacattgccaagaaaatctcagaaataaacaaccgggctggacttggaggaatttctccccatagaaatgtgtgcacagtactgtaattaataattgagtttctcatataaaatctgcccccccctttttttttccttacagaaattgtttacattgccaagaaaatctcagaaataaacaaccgggctggacttggaggaatttctccccatagaaatgtgtgcacacagataagcaaagataaacagggcagggtacataagtcctgcaacaccaatctttgtcctaaactgggaagaatgtaagtttccctatatagaactggctaaacaaacacgtacacctctgagatgatgtggccactaagaatgacttagattccatgttggtttaaggacttttaacaccagggcacactgcaaaagtgatgccatttgtgctagttttctgtcactgtaacaaaatgcctgagataattaacctgttagagaaaagtgttattctggctcttgaatttggaggttcctgtctcctcatctgttggtgttgctgatatggcacaacacaacagtgagtgagtagcacagcagagctgcttatgtcaagagaataagggggagtcacagtttctcagtttccttcaagggcacacttcagtggcataaagagtccccagtaggtcccatctcttaaaggttaaatgtctcttaccagtcgtggagaccatatgactttttaacatatgaccttttgggggacatttataatttaaaactatggtagagttttctaatagtaatgcaaatttaaaatttcaaccacaaacctgaaaaatcaaaatctgattttgaaagcaaaatggcttctctagattcttttagagccttaaaatatcttgcaacatatttgtaaaaattcatccaatttatatttcttcttccaccctgctcatgctttgccagggtcccttgtttgtgttttccaatatggtgcagcaatacataaaagcctggagatatttgtaggaaataaatgtctgtgatgatacactgttgaacttttaaaaaccatgtgtagtgtgataatatttacctataacatgagttgtaagtgtctagaaatattcacggagctactagcaactggaaatagacattaactatcttttcttattgtttttgaagtgagcagtcaggcatggtggtgtacacctgtaagcctagcacccagaaggcaaaggcagacagatctcgagtttgcggatactctggtctacatagtgaaatctagtctcaaaagagcaaatatatatatatatatatatatatatatatatatatatatataggacagtaaagtgttaagggattagataaagggaagctaagtgagaatatcaagtaaagaaaatccaagtcctttcagctgtagaaggaatacaactctgctggatttaatatgcacacaaatcaccttgcaaaaattcagattctcatagagggtgtgagatcaaatccaaactttgaatccgctttcctacccagctcctcagtaatgatgaacatcctggtgatccttgactatccaaggcatttatttagattgtgcatctctgtggttacacgggctggttgaatgtcctacttgtacaacatcccaaaggcatccattctatttctactactgttcaagagccagctcatacaagctcttaagagccagttaagttttcaggatgtttccaaggcaatagttgctactatttgtagtttgaaattagcttggatgggaatatgcatgtcccagaaatcagaaaatgatacaagtggttcagcagtatactcctgcttgttgcactcaactctcaatgcatcctgccaggcatgcgcccaaaagactatgaagatcttttggtcctttggaaatttatgtgttggtggggtggggtacttcagaggactagtgtatggagataataacttctaagcagaaatcaagccagaatacaggaagacatgattagtattaaatgtgattacaattatattattgttgataatttatggtatgaaaatacttttagaatgctttttaaattgttttattttatgtgcattggtgtttaacctgcatgtatgtctgtgtgagggtgttggatcctctggaactggaattacagacagttgcaaactgccaagtgggtgcagggaattgaacccaggtcctctggaagaggagccagttttcttaaccactgagccatctcttcagtcctggtatgaaaacattttagcagagtaaaattttcaattccaatgtttacctggaaagtggaaagaataaactatgatatctgtgccttaatattatcccccagtgccttaatattattttttttttccagagtggtgctatggggaaacggtagaacctagaaagtttgggcctgtgggaagtcataaaaggtgggaggagcttgaggttgaagaaatagttcagtatgtaaagcatgaagacctgacactgaaccccaaaacccatgtggaaaactgggttgtgacatgtgtgaaggggagacagctgggtagatacctgggctcacgggctgccagcctagcctactaagtttcaggccagtgagaaaccctgtctcagaaatgagaaagctgaatagagcctgaataataacacttaagatttgtctctggcctacacacacacacacacacacacacacacacacacacacattcatgcacgcatgcatacatgcatgcacacacatgtacatatagactccctcccaaaaggagaaactttttgtcaatttttgtgatacctatgttcataatacttctaactcttttgcaatatattatgcatcaaattgctattatttatcccactatgccatggaacaccataatatgttcctcccacttaagggcagctgcatacagaaggatcaacttctcctaggtctcctccatctctcctcagtctcaggtgactactatttctattccaaaagatcacatgggagtctgtgtatacagcatttgtctttctgtgcctgacttttctcacaatataatgttcccccagtcaatccatgttgtcacacatggcaggatttacctacaaactcatggaaattgaataatgcccagtttcaccatccctgggttgaagaaatatgcattcactcatatgtggattttagacatagagtaaggattaccagcctacaatccacactgctaaagaagctaataaacaaggaggtccctaagagagacatacatggtcccctggagaaggggagaggttcaagagctgctgagcaaattgggagcacgggaagaggggggagggagctaggaggatgaaaaggggagaagaggagggatgctgaggacatgagggagcagaaagtatgagccaggggaagaatacacgataacaagaatggagatatcataatagagggaaacatttttggtttacagagaaaccaagcactagggaaatgtctggagatctacaaagatgacaccaggtaactatctcagcaacggaggagaggctaccttaaatgccctcccctgataatgaaattgatgactaagtgctaagaggaaagttcatagcactaagtgcccatacgaaggaactggagaatagtcacactagacaatgaacagcacaactgaaagctctagaacacaaagaagccaatgcaccccagaggagtagatgccaggaaataatcaaattgagggctgaaagtcaataaagtggaaactatggaaacaatacaaagaatcaatataacgaagagttggttcttcaagaaaatcaacaagatagacaaacctttatccaaacttaccaaacagcagaaagtaaacatgcaaattagtaaaatcagaaatgaaaagggggacataacaacagacactgaggaaatccagagaatcatcaggtcatactttgaaaacctgtattcctcaaaatttggaaatctaaaggaaatgaacaattttctggatagatatcatttaccaaaattaaatcaagaacagacaagcaatttaaatagacctataactcctaatgaaatagaagcagtcatcaaaagtctaccaaaaaaaaaaaaaaaaaacagggaaagatggcttcagtgcagaattctaccagaaattcaaggaagagctaatatcaattctcctcaaagtatatcacccaatagaagcagaagggctattgccaaactctttttatgaggcttcaataaccttggtacccaagccacacaaagacacaactaagaaagagaactacagaccaatatccctcatgaacattgatgcaaaaattctcaataaaatactggcaaatcaaaaccaagaaaacatcagagaaatcatccaccacgttcaagtaagcttcatcccagggatgcaaggatggttcaacatacgaaaatccatcaaatgtaatccaccatataaacagactgagaaaggaaaaccacatgatcatctcactagatgctgaaaaagcctttgacaaaatccaacaccccttcatgataaaggtcttggagagatcaaggataataggataataggaacatacctaaacataataaaagcaatatacagcaagccaagagccaacatcaaactaaatggagagaaactcaatgtgattcccctaaaatcaggaacgagacaagacactctctccatacctcttcaatattgtccttgaagttccagctagagcaataagacaacaaaaggagatgaagggaatacaaattggaaaggaagaagtaaactttcactattagcagatgatatgatagtccacataagtgacccgaaaaactttaccagggaactcctacagctgataaacaccttcagcaaagtggcaggatacaagattaactcaaaaaaatcagtagcccggctatatacagatgataaatgtggggagaaagaaatcagagaaacatcaccctttacaatagccacaaacaacataaaatatcttggggtaacgctaaccaaaaaagtgaaagacctgtatcataaaaattttgagtcttcaaagaaagaaattaaagaagataccagaaactggaattaaagaagataccagaattaaagaagataccagaaactggaaggatcccccatgttcttggataggtaggatcaacatagtaaaaatgtcaatcttgccaaaagcaatctacagattcaaaatcccaacacaattcttcacagaccttgaaagaacaatcctcaaatttatatggaaaaacaaagacccgggatagccaaaacaaccccgtacaataaaggaacttctggaggcatcaccatccctaacttcaagctctattatagagctatagtcctgaaaacagcttggtactggcacaaaaatagacagatagatcaatggaatccagttgaaaaccctgatattaacccacacacctacgaacacctgatttttgacaaagaagctaaagttatacaatggaataaagaaagtatcttcaacaaaatggtgctggcataactgaatgcaaacatgtagaaaactactggtagacccaagcttttcgccctgcacaaaacttaagtccaaatggatcaaagacctcaacataaatccagtcacactgaacctattagaagaaaaagtgggaaatacccttgaacgaattggtacaggagatggcttcctgaatattataccagtagcacagacactaagatcgacaattaataaatgggacctcctgaaactgagaagcatctgtaagacaaagtacacagtctgtaagacaaaccgacagtccacagactgggaaaagatagtcaacaaccccacatctgacagagggctgatctccaaaatttacaaaaaactcaagaagctagtctccaaaacaccaaataatccaattaaaaagtggggtacagaactaaatagacaattctcaatagaggaatctaaaatggctgaaagacacataagaaagtgttcaacatccttagccatcagggaaatgcaaatcaaaacaactctgagataccatcttattcctgtcagaatggctaaaacaccaatgacaatttatgctggagaggatgtggagaaaggggaacactcctccactgctggtgggagtgccagctggtacagccactttggaagtcagtatggtgattcttcaggaaaatgggaatcagtctaccaaaagatccagcaattcctctcttaggcatatacccaaaagaagcacattcatacaagaaggacatcggttcaatgatgttcatatcagcactatttgtaatagccagaacctggaagcaacctaaactgaggagtggatagagaaaatgtggtacatttacataatggagtactgctcagcagaaaaaaaaatggaatcttgaaatttgcaggaaaatggatggaactagaagaaaccattctgagagaggtatcccagtcacaaaaagataaacatggtatatactcacttatatatggattttagacataaaaaaggattaccagcctatattccacaccaccagaaaagataggaaacaaggaggactctaaagagagacatacatggtcccccagagaaagggaaaaaggacaagatctcctgagcaaattgggagcataggtggagggagagggagctaggagaatgagaggaggacaagaggaggggtgaggaggacatgagggagcaggaagtttgagttgggggaagaatagaggagagcaagataagagataccataatagagggagccattacaggtttaaagagaaatcaggcactagggaaatgtctggagttctacaaggatgacaccaactaataatctaagcaacagaggagaggctaccttaaatgccctcccctgataatgagattgatgactgacttatatgccatcctatagccttaatccaacagctggtgaaagtagaagcagacacccacagctaaacactaaactgaactggaatccagttgcagagaaggagtgatgagtgaaggggtcaagaccaggctggtgaaacccacagaaacagctgacctgaaaaagggggagctcttggtccctagactgatagctgggaaaacagcttgggactaatccagacccaatgaatgtgggagtcaatgaggagacctcggaaacctctggtagtagatcagtacttatccctagcataggaatggactttgggagcccattccacatagaggaatactccctgagcctagacacatgggggtgggcctaggccctattccaaaggatatgacagactctgaagactcccctatggaaggcctcaccctccctggggagcagaaagggtatgggataggtagggtgttagttgggggcggggcagcagaggagggaagggagagggaactgggattgacatgtaaaacaatcttgtttctaattcaaataaaaaatggagaaaaaaaaaacagaaataaatagttgtgccacagactgggggcatggggtggggtggggggaagcaaccctgcaaaacagatcactcccttactaagggaagtacctacagaagatgtaaaaaatctgataatggggtgataaagagacaagagtgccaaaaaagacttgagtaggaaagagagaaagaaagaaaaagaaagaaagaaagaaagaaagaaagaaagaaagaaagaaagaaagcagtctttgtccaggccaatatcttagaatttctgtttcccatatgttttcttcttgtaatttctgtttcaggctaagtttttactgacttttagttgactttggtaactagtagaaggtaggggttgaatttcattttgcatatagatagctttcctaacatcatttattgaggggactctccatccagtttgctatttccggggtttccattttatttcattgggctatgtggctattttgtgccaggaatgtgctgcttttgttaatgtatcttctatagtgtactttgatttcaaatcaaataatgtgatagcttcagccagctttgttctacttggtcaagagtactttcgttttattggaaatcttttgtggttttatataaagttttatctatttatgtaaagaatgacattgttatgttgatagaagttattatctcaacaatattatttattcttatctgtaaacacaggatatctttccatttgcatcatcattatttctttcattattattctgtatatttgttgtagagaattttcacttaattaaatatattcctacgtgtgtgtgtgtgtgtgtgtgtgtgtgtgtgtgtgtgtgtgtacatgtgcatgtgtgtatatgtgtttaaagtgagatggttctttggatttctttttcacaaatctgactaataacacataactacactaatgaattttttgtgtgttgatttcatatcctgtaactttagtaaacttccatattacttccaacagtgtttttgatgaaatctttaaggtgatccatatacaaggccatgttgtctataaataaagcagtttgacaccctcctgtccaatatagatgctcttccttcctttcttttttctatctgctctgcccaaaaactccaatgctatactgaataaaaatgatgaccatgctgccttttttctcttaaagcacgcagcattgtgaaaactttggatggatacattgctgtatgttgatgtcttatgagttggaaaacattatgattgcattacttttattgtaaaattagaggggttttccctttagagtcaatcttgtttttatagctcttagaatttcttatttatggaattatttattgttctgttctcagtgtttttacttattctttgagaatttcatacaatatattttgataatattccttcccccaactcttcccagatccttccttccttcttataccttcccaactttatgttctttctatctcttaaaacaaaataacacacacacacacacacacacacacacacacacacacacacacacacacacacacacgaagtcaaatttgtgtgaccaattaattggttcagcatggaacccaccctggagtctagtaaacagctgatacatctaatgtcattctattggagaaaactgaaggtttcccctctcctggaagctaccaattaaaatagcttcttggataaggatgggacttcatgcctgcttcccttcctctgtgctgggattttctctagcttgagtttatgtgggtctcatgcctgctgtcacagtttctctgagtgtgtacatgattctaccctgttgtgtctgaaaaacgatgttttcttggagtcatccatcacctcataccatcttccacatagatctctgagccttgaggggagaagtataatggaaatatcccatttaaggctgagtactccaggcaggccctcactctctgaatgctattcagtatggatctctgttttcactactgtctactgaaagaagaaacttctctgacatgggttgaactatacagtgattcgaagttctggctggaactccagtttagactccaagctatttttcagtgttttttgagagtttcatcatacatcccagactggcctggaactcaaaatcctcctatgtcagaaatccaattgctgttatcacaggcttccaaccactatgccatcaaacaaacttcttctgatatgtatgacgatatatcccataatatatagtactcaagttattcagacataaaaatgtatgagaagcaaattggctgtgtattactaaaacatcttgatgtttagaactcaacatctctgaatcagtctttatcaaagagtcaatatttgattcacaaaactgcagagctgaaacaggatattatattgttacagtaaaaattttattcaagtattatagaataaagagcatttacaatagtctggatgcatgtcactctgatacaacctcgaaattcaagtaaaatgcttttaatttccaaagaaagtttaaccagttcaagttaatttttttttgtaaaccagcctttttcatctaaaaaccataaaatggaatggaccatctttgtcactctccaacctcaatgtgccaataaatggccccctaggtgcccctgtatattgttacaaaacctacatccttttcacctcctttatagtcctcttttatggctattaatttttaattctagagacatagtcactagacacagtcactatttcttgtcctctggtgggagataaacgtgatttagatgctgttttatgtatgcttaggactgatggctctgattgtgtctattccccaagagaaaaattgctggtttccacaaccctttctttgctggccataaaacaaatattaaacaatggcaataagctgtgagcctcctagagtgctccaaattttaattaaatgattgctgataaaatatgacccaatacagtttgtatggagaactcacttgatgaacctttatgttgaccacacacactacttagccccttgagaccaagtgcacatacagaatcctgagccattttacaacttgtagacttctgatgtgacagcacagtggcttagcaagttgagttctttataaactgaatctcagattcccaactagagttggttattgactcgtaaataaagcaaaccccttatctctattacccttaatagtttgtattagcagccatctgatgtcaagtctgcaaagaacctacagagaaaagtgatgagtcttaaagtgcacatctctaggatgatctagaactgttagaagcagcctcctcttaatcactcattgtttaaagaatggcaattcaccgggtgttgcctggtccatcctccacagactgccaaggttctagggaaggggtagagaatcctcttaggtaatgtctacttttttgtgtatgcttttcagactttttttttttaagagaactacttggtgtttttttagagaattgtcttctctaattctcacaacttattgctccttcaaaaatgctttttttttctttgttcaacatgttcaaacaaaaatgtccaaaggcattagtgcacggttaagaagtaagtcaaagctgggggtctgccacctaactgtgctcctgactgctacagtgtaaacccactctccattctgtcttctataacatgaaccagactgagtgatgaacagtcatcagaggcagggttacaaagatgggttgaaattaacaatttgcaaaatatcatgagaactgattttgtaaataattaatttgttgacttcaagcattcttggtgatagcacacttttgaatcccagtactcaggaagcagaagcagatggatgtctgtgatttcaatgtcagtctggtctccataacaagtttcaggctagtcaaggttacatagtgagactctatctcaaaaccaaaatggacatcctgggcatcactcgcatcctctggagacctgtgcttttcaaatttcaacatccatccaaactactaaaaacttcatgcttgttaaaagtgtaggtctggtgtgaggttcaagattctgcatgtctacctagttctcaggtaaggccagggcttgatgaccctactggctcttggtagcactaggagaggtttcaatgcttctatgtgctgaacacacattatttattggatcacagcacagagttgtaagtgctgctgctgatgtcattccagtttctcctttggtgataaatatatcctctgggaatgcttgtagccaacaaagaggactgtaaactgaatgacaggataaaacaagcggaggggagagtgatcctagaaagatctgctgcaccccctctcttggctgtcactcttgataaatggctctatgcagaaaggttggactcaactgcagtgatgacttgcaattaaaccctctatgtgtcctcagccctgctcattagcatactcttcatagaataaaccataactacataatacatggcatatcaaggtggggtcaaatcttcattttggtagatggtacaaacattggagtctacctctctagatgatgaaatttagttttatatcttaaagcttacgtttttgcttcataaggtccacttgaaacaaaacagcaaatgcatatcacaaattaaaataaaaagtgtggaaacaatatcatcttctccaaagccatctgctcatcatgttctcctttccttcatttgtctattcattcaacaacatttaccaagcctgtacagtatggtcagatattgatttgtgttgtagggtaaagcagtgaacaaacatcacatacacacacacacacacacacacacacacacacacacacacacacacacacctggtttatatatgcagactaaaacttggcaggcagaagaaattaaggaaacagcaaagataaagcaaagaaaggattaagggatcacgagtgtgggagacatttcctatggaagaggtgggtggtgatgaacacacagggcagggtgggcaaagaagtgggaacgggtattcgggtgtacagctaaagagacaagaagccagaaagagggggattaagaactgcagtacttttgcccagagcagctacaagaatctggccaccatttttcattcagtttaaatttatttttaagacaggttcttgtatacagcttgagttggcctcactctcacaatcttcctgcctcagccttctgagagctagggttacaagtacgtgccagcagggaccacttcagattcccattttagtaagggttttatataagcagtgaacaaccaagaagtagaatgggtgctgggtgctgttcttctaaattcaattttcagcttatagggatagagaaatagaaaaacaagcaccattatctatgtgaatccaacaataaacaatccttttaattgtgtcaatattttctattatatatgaaccttagcctttaagctttagatatgtatgtatcaatctgaataaatacagaagttagatagctagtaggaaccaatggggaggagatgatctcccaaggaaggagaattaggatatagtgttatggagtgttaaagggaaattagaatagaaggatttagtagggagggggataggggagaaacgtaaaggagggaatatggggaggggcaactaacactaaaaggcttttggaaaaaaagcatatgaaaacctactactgtagaagcttcctaaaatacatacacatgtgaaaggaatttacatgcggtcattatataatagaagagacaatgtcccaactagaaatcttatgccatggactaaaacctccagtaccaggaatgggttacatattgagtcattggccgaaggggtcccatagaccacccccaaacaccacaggataatgttaaggtaattgattactgtctacaacctaatggtaagaccctattgctgaggacagaacttgctcttgtcatcgaacatgaagaacaagagaataagggttttgtatatgacttggcaattatacttttcagtgcccatggctatgaggtaacaggtatagcaaagatcaattggatatacacttgtggcttccttaaaagaattttgtgtaatttgctataatataatgtgaatataatagattcctataatctattatattcacattttacattttattttagaatattttatcctttattcatttattgatttattttaactcttattttagcatataatacatccacaattcaaatcaatacatcaaaactcaccagaaagattatctcaatagatttagaaaaagttatgataaaatgtaccaccagagaaggacaacttccagaatagagtaaaaacactactccctgctcatcctgccaagtacagctaactatcctggctgttatgtgttaaataaaagaagacatgactctggaagcagggagtgaaagagactggctaggaatcttgaaaccaaaggaatgacctggggatgagtctcttgaattttctttctgccatttacattgcagagtcagaactaaagaagagcctatgacccagaaacatcagtagtcagaaggaaaaaaaaccacctctctagccagagtggttcataggcagcctaagaaaataggaagagaaaggttgagaaccactctactctgaccaagtacaaaaaacaaaactatggtcaatcacagcctcacggcaaagactgaatgggaattctctacttctatccttgaaaagctataaacaagtgcttcaacacctcaccatgatagtgtctaagaaggccagataaaggtttggagctttcactcacaatagctgctaaaaagatcttttctctctactttcctgcatctgcccagacaaagctgggaacctggacctggacctcacactgcaggaataaggagacccttttgtctcctcacattagaaagtattactgtcaggacatatgatgaagaatcactactcagcttctatccagtagttatatggccacctcaacagtgttatcagtggaaaccacgtgaggagcccaaactcctacttccgcccagtaaaaacaagaaagccttccaactcaatgtcagcaatagggtaatgtggctctttctcacatggccttatacttatacccttccagtcccccagagtaatgctgaagaaaggcagctatctaaaatggggtttaaataagattcagagtcttgtaatttaaaaaacaaaacaaaacaaaactgggtctcagctggaaaaaaatcactcttcatgcccagaaccagaaggatttcaaaaattatagataaaaaagaaacattaaaagttgctgacagatccatagtcacacatgcttgaaacatgaaaaggcagaaaactctgagtgtgctggcatatgcatttgttcccagcatttgagtggcagagcaggtggatctctatgattttaaggctatcctgatctacacagtgaattccaggccagccagggcttcacagaaagaccaactctaaaaatataattggaacactgcctcagagagctagacaaggtcaagaggaatcaattagaaattttagcaatgaaaacactgtcgctgaaatggaaagttcagcaaatgagttccataccagaatgaagtaaacaggtacataggaatagggaagttgttagtgagtggcataataatagagagcaggcagaaactagactaaaattcctgaacagattctataacaaaaatttaagatcatgcagtcagttttttcttagtttttgagccaaggtctcaacatgtagaagtggccagcctggaatttgctatctaaaccaggcaggcctcaaactcacagagattcacctagttttgccttctgagggttgcaattaaaaggcatgagccaccatgccaagctagatttttgttagaaaagaactgaaaaagaaactgagcaagtaatggctatgaagtttacaaattcagcaagcagcatgggatagggagatggcttagtcagtaatgtgtttgctacgcatcatagaacccaagtctaatgcccagaatccatgtaagaaagcctggtgtggaactgtactcctgtgactgtactcctgtgatcccagaactgggaaggtagaaatgatccatggcattcctggccaaccatcttacccaaatcagcaagttccagattagacaagtgaccccatctcaaataataaactggaaagcattcgagcaagacgccaggaattgaaattgaatttttggctcccctctctctctctctctctctctctgtgtgtgtgtgtgtgtgtgtgtgtgtgtgtgtgtgtgtgtgtgtttatgtgtgtgtaaatcaagagaatttcagtcaatgctgtagatgtactgtaattaaattctgaaaaggaaagatagaaaacaattcttatccacatacacaatacatagagaaaacattttaaaagctgtgcaaatggggatagagtgatgacagctcagcagttaagagtacttcccactcttccagaggactcaagcttagttcctaacactcacattaggtacctcacaaccacttgtaactccagcttcagtggtatctgatgcccatttctagcctccttgaactatactgacgtggcatatgctcacacagatacagacacattcacacacatacacagaaaaacaaattttagagctatgccaaaataaactaaaacactatagaacaattaaaatagaattctggggggaaatgtttatgtaactggagtcagaaaagacaagacagaacaaccaaaaccaaagaacaagcaaggtaaaccaacagtggcagattgaagctgtattggttacttttcttgtcaccaacaaattatctgtcggaagtaactgaagagagtaagtttattctacacttgatcttagccaaaaggtcaagaagcaatgtaagatttactttgaatcactgttttaaaagtttctgtccatcatgttaggaagtaattgttattttcatgaatgataaagtgtgtggcagagatttcacaacataacagaccaagaaatagagcatggattcagaactaggagtaagtcctctgttgatctactttcaccaggaaggctccacctcctaaaagttcttcagcaaactgagggccaattgatcaaaagcataaacctgtggagaatatttcaaactataacagaagtgaaatatcaatactgacactaaatataaatgatacaagtatcctagtcaaaagatcaacagactaattagaaaatataattcaactacatactgtatgcaagaaactcacttcaaatccaatagcatggcaaattgaaaattaaatcacaggaaaaggtaaatcatataaatattaatcaagtaaaacatgattatactgggaccagagatattagagttcagaaaaaattaccagagtcagggaaggccatcatatgatgataaaactccatcttttaagaaaataaaactgatcctaaatgtgcatatatgccaacaacagagcagaaaaatatgcaaaggaaactctgatagaactttctggtctggtaactcattcatgtaacctgagctacttaagatgctgggacaagaaaatcttgagagctcatgagtttaagacaaacctagtcaatataagatcctgtctcaaatgaaaaaaatgaatagagctgactgacaaacaagtctatgattttagtcttacatttattgattatttattaacaggatatgtagacataagttatatagattaattatatataattacttgctatactgatctcaacaacactctctcaataatgggatacaacaattagactagcaatcagcaatgatagaggacaattcagtaacaccatcaaccagtataagcaaaaaactatactaattcagttaataccaccagcaagacacatcgtgttttttgtgaccatgaaaaatgtatcaaggtgtaccatagagcaaaaacacagatactcacatgtaaaagaattgaaatactacagaatgatttctctaatcataacagaacaaactagacaccaacaacagaaaaataagaattctccaaatacttagaaaccaaaacacataactgctaaataatccatgggtcaaataggaaatcttgagggaaatttaaaaatacataaaaataaaaatatagcatatcagtgttttatgacattagtaaaccaacacttaaaaggaactttctgatgttaaatgcataagtttttaaaaagggaatggtcacaaatttttaatctgaaatcctatcaaggaaaaaaagcagactgtaaagaaggaaatgttaaaataataccagaaatgaatgaaatttaagagagaaaaactagggaataatcactgagacaaaatgctagttctttgaagattgctaatagcagtaagcctctaatgtcatgggaacaggaggggagggaggacaagagagaggggaatcactattttcagaaattaagaggggatagcactgcatactccaaagagtttatgaacaaaaaccacatacatgtatttaataacatacataatacaccaattcctggataaacacaagttatcaaaaaacaactactttgaaaaagatttagaaaagtcctgtaactgttaacaatagtgaatctataatttacatacttcacccagagaaatttctagatagtttcactgagaattctcccaaatgtttaagtgattcacagttctacacaatcctctccaaaaataggagcgactacttgataactcacttcatgaagcctagtattatcttgtcaaagtcagtgaaaaaagaaaattattaaacaatatcttttcgaattatagacacaaaatcattgtgatgctatcaaaggactatgaattagttcatggttagggcccctgtcttgcactcacatggcaaagtttactacctattcatgcaatacacacactcataatgcacacactcacacacacacacacacacacacacacacacacacacaaatttcacactacataagaagattgatacaacatgaacaagaaagtgttttcagccctttatatctataaaacacaagcataggtacaattattgcatcaacaatcaattgaaaaaatataagtacagttcttatggtaatatatgcttgtatacctaacgttgggaggctaaaacagaaagaataagtgtcggaggtcatagtgagagcacagagaccctaatggtaaagctggggaaccagcattggaccgaaccaagccctctgaatgtgggtgccagctaagaggccaagacagtctatgagacctctaagagtggagccagtgtttatccctagagcacaaatggactttgggagtccattccttatagagggatactattgcagcccagatacaggaaggagggcctgggccctccccaaatgatgtgagagactttgatggactttgacagcctttgtgggcttcattatccctggggagggactgggggtgggttggaggattggtggggagcatgggaggatgggagggtgagggaatggagggatggatatgttaataagagtgcttctaaaataaaaataatttttgaaaattttaaaaagcaagttggaggtcagcctggctaaattgtgaatttcaggttattttgccttatgtagcatgaacctatcttaaaaataataataataataataatacaataataaaataaaataataaaataaaataaaatataaaataataaaaataataaaaaacacaaacaaataaatgcttaaaaacagaaaacattacatgactacaaaaattatttcttctttttagtgtaataattttattaattgttgagaagttcatatacacttctaggggatgctgtagcctcgcctgcttagggtctggctacaggtgtgcctgaccacgcctttgagggcgtggtcagggagacatagagtgagggctgctttggtggcaggatgctttcactttcatctctggcttgctggactgctgccctgccagctggctaggttgctctgtaagtaaggcttttccctattaaattcccttgtatttttacctggctccgtattggtaatttcccacattacacacttacaatgtatttcagtcatattaaccctccggtccacagacacttattctttgtcctttggacagttgtgaggatctatatttagcgccatccactgcctgtgagtctagggtgaggtctaaacagtgcactgatatatgaatataaagataaaaatttagagcgtagtttgacaatctgtccacttagcaccttaaatccaagcagtgtttggttacctgataatattcatgccataattgcaccaaaggcagatctccccacaccagcctttcttttagctcatagggttcacagctgggcaagactgttgatgactcctccccacctcacccctgccctgggcagcaacagagtggcttcctgtaagtactatgagagcttgccagcaggtcaaagcttcctaatcagtaccaatttgatttctccatgtcctatgaccaaagtgtacggcatttcagcaataagatcttaccaaaaagtaccggtggacagctaaaagcaatggcaatatcctgttgttttcagggtctctgaggccctgctgaccaacaacttaaggaaagatattccacatctggcactaagctttttatttgaaaattctaagatttctgtgaggaggaccagagtagcatgaatgagaatggtcccccatactgaattcttggtccctagttaatagagctatttggaaaggattaaaaggtgtggcctagttgatgtccctggagggtgggctttgggttttcaaaagacttgtgcaattcactgtgctctctcttcctcatgtttgtggatcaaatatgagtcttcagctgctccttcagtctaccatctaggactttaatcacctgacactacgagccaaataaaatgcttttgttttataagttgacttggtcatggtgttttatcacagcaatagaaaagtgataaagacaaacattatctactatttagggtaactaactaaactcttttatatgaatatatagataacgtaagtatatctatatatgaagcttaaaaattgtaagcttctgtgtagtttttttctaacatttttagtgttaattatccttccccgccacctttctcttcttccctactctctcacttaaatggacttaaacttccattttacctccaaggttattggactgaaatctttactccctcaatacatataagccaaggctatccaaagttctttgccataaggacctttctactacactaacttattctatcatagtatgaaggctgaaaagaaaataaacagttttttgttctttgaaatatcttaataattagaagtaaattactagatttttgcacatgttcaaagatcacacaatacaggagaacttgaatatctggaaatggatgtcatcattatagtctgaataccacattcctagtcatttggtcatgaagtctcttatcagactcaccaagatacccaaataccaccagaatcttggccaaataaacctctttttttattagctagtattgggtattgttaagcaacaaaagatgagcatatgcttttaagacttgccaattaaaatttttaaagaaaataaactatgattagtgatcatgagtatgattccagttgttagagactgaggcaggaggattgagtttgaggacaccatgagctccagagagcaaagagagtgagagcaagagagagagagagagagagagagagagagagagagagacttccaagtagattagtttcacaatgtcattgtcttttttttctggtgataattttttaaaattccttcccaaaatgaagctgtttttctcctctatgagattaattgttgttgttgttagaagctatatgtaacatcaatcaggtgatcaaatgtatcagttcaatgttttctagaatctttatgacttctacaaggttcatcaaacctgttttgtgggtaatagctaataaaacttttgtttctctgtaatcacttattagtgttcatcttcaacatatttccaaactagagaaaacccttcttatcctatactttgagaactaaattgggtatctggcttcatggtaggctaacaactgaacatcttttctgtggtcatactggtgatctccatttcataaagttaaacatcatataaagattcctgcatattttaaggaaaataacaaggaaccaaaaccttctactggaaaagcctcaatacctggagcaagcagccacaccccttgtaatggcaggtaaccatttagtgtgttagagcttccatgacaagttagggactgaatggagcttgcatatataatacatatcacgtattatattacatatatggtgctatataactataaatatttatgtagacagatgaaaagagcctatttggttcttttgattcaaagagtcatttggttaagacatagcaatagttcatgtgatgtttcttacagttcttttttgttgttgttagggtttttttatttttgtttttttgagacaaggtttctctgtgaaacagttctggttgtcctagaactcactctgtagaccaggctgacctcaaactcaaagagatctgcctgcctctgcctcccaagtgctgggattaaaggcatgcaacaccactatccagcagccacacaccagacttcctacagttattttaaggtttcatatgaattgttttttagggatagcttgaaactccacctttaagtcaaattatctaagagcaggacaaatagatttttgttgtgcttcaaaaatacctctgtatatatttttatttgtttctgcttagctttgtctggtcggtgtttctaaaattatttattggccagtgtctaattctctcatagtggtacccttcatcatgttaacttagctaaaatgtgtgctttccaataattttcttcaaaaagaatgtcttagttagggtttctattgctgtgaaaagcccccatgaccataactactcttataaaggaaaacatttaattggggtggcttgcttacagttcagaggttcagtccattatcatcatggtggaacatggcagcttgtaggcagacatggtactggacaaggagctgagagttctacatctttcaagaaacatgacatggcatgagagtcacactgattaaagcttaagcaaaagagaccacaaagtccacccccacaatgacacacttcctccaacacggccatatctacttgaacaaaaccatacctcctaatagtatcactccctttgggggcattttctttcaaaccacaacaaagagtaacttcaaaagtgttaaaattacatgtacacattttagctgcttgcttaaatgagacagggtttttctgggctttagagcctgtcctggaattcgctctgccaaccaggctggccttgaacagctaaaatgtgtacatgtagctactgtttaaggactataaggtaactctatgcagttttaaattcagctgtgctaagtttcaaatattttactaagttaaaaccagttacagtcaggctgaaaattaattacagaaataagaccttacctagccacctgtatgcttcttgtgtgcttaagacaagtaactaaaacagacagacagacctctaatgcttcagagacctgcagaatatttaaattgttatctttaaagtttatcagagagactgccagatcctgacagtgacccaaagtctccaaagaagattatgaggcaccccagttcctgcacctggaccagtgagcaagatgctcagatgtgacacctgctgcctgccaggacttgaccaagactgtggacaaagctgctggacactggaaagttgattgcaccccctttgcctagacaaaacaaggtcagtcttttccatgtccctcttccacagagagaaaaaaaaaaccctctcgcctcataggcctggtgaagattgctgttctttgagacatctgcctccagtggtaatggagagacttgggtatggctaactgtatatggactggcttctaactggcttctgtcactttttagtagattcggataaaatatatccttctcagatctctgaaatattaatggttgtcagcttgacagcatcagagagtcagatccactataggctatcgtcagcatgttagctgataaagtaatgactacctactgtttagtgacaagttcaaggtttttaagtttattttggttgtcatttaggtataaacttaaagggcttttcatcaggccaaatgcacctctgtccaatccatacatggctctctggacagaagaaaaatgtacatgcttctagcccaaatgtgtagtcataaattataaatatgttcctgctgtttgaacagatatccagatatctgctttttctgcactgtgggcttcagtaaataagttttaacctctgttcctagtttaaacatgtcttaaacaggtttctgcttctggcagacaactcagttggccagcaactgagtatcagttgctgactacaggctgttctaagtagactgcgagccctggatttactgtggatgtgaaccagtccaactgcaccccctgtctttgcaacagagtctgccaacagcccctggtggattccccattgcctaaattccttttttttttttttttttttttttttgcttttgactagcatttcaaccttctggggtccctaacttcatcccaaagtcagcaggaagtagcatgggaaagaatatgccgtccattttccctggttaaaatgctaagtcagaagggactcccttgcatggggatgccaatatctctcactccctgatgggggcgctagagagtcagcaattccatgattggaatttcaaaaaaaaaaaaaaaaatgggggaatgaagggaccagcttcccatttcggcagccatagcagcttgtctgaccttgtcctagaaagtcagatccctgccttgtggcaaggaaccaatcagaagttagctggtggtgctatgctttatgcctctgggtgtgctttatagacaagtgcacagcaatgatgcacagagtatagcaaccaccctgggagggcctatgggccataacaaccagttggccaatcaacacagagcaagccctccaagcctggaggcacaccaatcctgagcctgtgcatacccctagacactccccttacgctgacctacaagatctctatgcagccccttccagctgtctttgctagccatccgccatggagggtgggtgaaagaccggagctaacatggggttagctcgttaaacaacaataaagcctcatgcagtttgcaaaaaagaaaaaaaaaaagtgttaaaattattagacactctatgatgaagactacatagcagaaagtcagattttattcctaaaatgagagttattgttctaatgtttattacaaaaagaaaaacaaaaagtcatttaagaagcttttttccttaaaaggacaattttaaaggataattacctatgtttacctgagttatccttaaaagtcaaattggaatctcttcatatcatcatcgtatttcatttgtcaaagattgacatttgttaatattttatgtaattcattctaattatgtatgcatgccaatttgtgtgggactttgttatttctcatttttagctattttgggattcctattaacagactacaaagaagaatgagaaggattagcaaaataggaaagacggatatagtggtgcccgtaatcccaaaatgcaggagcagaaggcaagaaaatcataagttcaaagtcaacctgagacatattactagcccccacccccgcattgctcccccattcaaaagaaaaagaaaaaaatgagagagggagaaaagaatgaaaatgggaaagtaagtttagttcactccctgatgtgtactttattgtcctttttattcactggcttttcttaactggaattgcagtggttctcaacccttggggatcacatatcagatatcctccctaccagatatttacattacaaatgtataacagtagtaaaattacagttatgaagtagcaatgaaataatttttgcctggggatcatcacaacatgaaaacctgtatgaaagggtctcagcattaggaaggttgagaaccactgacttggaggaaagatggactggttagtgaagttgagaatgatggattagtgaggaactctgacataattccaacttttggttttctatttcctctttgttttatgtggttatgggcatgtctacattccttctggctttttgtgactgctgataaactgagattaaaacattaaatgtatttccaaagctaccaggcaatagggtgagagcactgtggatgtgttggctcaaatgatgtaattgtcactctcatcaaaggaattgtctttcattagatttagctccattctcgataagacatcatcataaatatgatataggattcatttcaaaagatcagacctattaaatcagttctggagactgctggaagatataattttaaagtacattaaacactcttaaacacacgacctttcttcccccagatacctctgagaaaatgtaattaaaatgtctgtttttttccaagaaaaaactcatcagttctttactacattagaatattgcataccacaagtgtttgactttattccaccagactcaacattaagtacttatgtctgcttataatggagaacctgaaatgtgtgaagacatgcttcaaatgatgaagaaattgtaaatgcatctagtttgaagggaaatagactatctgctaattgcttcaagaattgagtgatttggaagacctcaggagaggcttcatttctctgatttgcatacacttggctccagctacctggcttactgtaaatgctttgatgatgctgtgtgtggagtgttcctcatcagcaccagagattgagaaggactctgtggctctggggaccagaggaattcttccctttaaagaagctgctccttgttgttatccagcccttaggagagcggacttcacattatgacaaatgatctggttttctgagtccattgttttattgttgctattgccaataattaattggcttaattttcatggtaaagccagttaatatagcacttcagctcttgtggagattttctcttaagcaggctaatataaaaggataggaaaagaactaacactattatttttgtttcctttcagagattttaacacccaacaatgttaataaccaaggactcttctggctgcaaaatgaagtggaaaggtagcttgtagcctgacttttacacaagttgaaaatacaaactcttccgaaggagatgaatggtggaggaactggggggggggagaggacaatagaaacagtgaaactgtgttcccagacaatggaaacaaaggggagcttcaaaagaggataaaatcaaaaggcaaagaaagaatcaaattggggtggaagaaataaggcagagaaattgaagagggagaagctaaaataaaaaaaatggagcagagagaagaaaaaggaagagctacaaacatacactgtgtgatacaaatcacacattatactactttacaaaataagcccaatgaccaagtctttgtgtttgccacagtttgcctatggattacaatgaaaatctgcctccatgttctaatgcatgaattctcaacttcatatacctggaccttccacatagagactattattgaggctttagaggattagctacctctgcccatggcatacaaagcataatctttataatttaaaactcaccctacaaccagagtttctgggtatgtatgaggataatcaaaatgttaggatttttcatttgtcttgagtacacagctatgattttaaaccatacaaagggttactaagcatgtcaaagatgagatgcaatttaaaaattacaagattcataaggttaactttaatttcagagaaatctgttcaatatgaacgcaaaatgaataaaatataaggtcatcggaaaaatcatcctgttttcatgaaccttgatcacataatagacattacatttgttactgaaatgtgaatgaaaatagaattctagataagttattaatcataattagaatgactatgacaggtctgcggtgacaaatacttaacaagtagtaagaatgcttattcataacaaacctcttaattcattaaattcttcattaaaagggcaacctcttaataagttcaacataaagttgatataacacgctatttgcatttctctctttttattttcattttagggatgtattgttaacaaattgagataaatcacttaaaacatataattacttggatatggtggcatagtaattccctaagcaattgcacggttataggttgtcagtgtgcatattaatccatcatcccaccagcctcatcttcactgatttgctactcgctgttagcaaaacagattaagaagcacatgctgccctgctctggaagtttcattgaggcacaagtagggcaaacactgctttccaattaggatcctgctgtttgccaggacttgacaatgactaattacagtcctaaatgacttattatgtctgtatgcatgattatttataaatacattttaagagctgtgtaaaataattgttcatggtttaaaatatgaaaggctacttttgcacaaagggcaaagacctgttgaacaccttgaggtcgaaggaaagaaggcattttactgttgaagttggggtttgctgaggctgccattacctcgagatggaggaaaaaagtaagtagtttctgatcatgaagtttttagagattcggtgctaggtttatggctcaaccctactgactaccaatcttaacataggatttgggaaggcattcactgttcttaaatatgaagttgtcttatttaagtcttttttgaaaaaacgtaacattttatttgtttacttagtgtgtgtgtgtgtgtgtgtgtgcgcgcgcgcgcacgcgcgcgcatatgtgtgcatgcatgcatacatgccatgtcaacactcagactggtgccttgaccactgaagaaatggttctttccattgttgatcctttgcctctccaagtatgagctgtgtgacaggttctgacaaggaataaaaacttaagataaaattttaaaatatataactgtagaattttgaggtgtttgggaaagtcatttggtcattgattattcactgtctaggcaggcgatgcaaataaaatgaactccatgtacaactgctgaaatgggctccatagtacagtaagtcaaacatatggtaaaaattgagcagaatagggcctggagacatgaattcaggacatcccaaactctcttcctgcttcctcaggtaatcccgaacatatatacgcataaattgagataataaatctttggggctggagatatggctcaggggttaagagcactgactgttcttctgagttctgagttcaattcccagcaaccacgtggtggctcacaaccatctgtaatgtgatctggtgtcctcttctggcacgtactgtatacatgataaattaattaattaaaaaagataacaaatctttgaaaaataaagcaaagtgggactatgggttgtaaatttaaaacaatctgagtagaaaaactactatgtgaaatgccatgagaatataacagcacaagttatcaagtgccatcttttttcatttgttttgctttgtttttcaagacaggatttctctgtgtaacaaccatagttgtcctggaactagctctgtagaccatgctgtccttgaagtcacagagattcgcctacctcttcctcctgggtgttgggattaaaggtgtgtgccacctaaagtcccatcttttaaaatatttttacacacccatatggcaaacaacaggagccactgctgatgtccacctttgcacccatgctctggtgtaatcctctgccatgacacagaggcaaaatttgtgacttccttctagtaaatggaatatagcaaagataatgaagccccaccttcagtttatgttgtaatgtccatcttagcacattaaagtggataatgaagcaagctgtcatatttgaagaaacccaatgacaagaatctaggacctgagggtcactttgagagatcatctagcaaatgctggggccctcagtcacacagccacagcaaataaattctaccaccacctacgtgagattgaattcaagtactttcccagtcgaacctgtagattaaaacatattctatctgatatccttgatagtagtcttatgggtctctgaacaaagaagccagtaggttatgtccaactcccaactctctagaactgtcacccaagccactgtgtgacaatttctcgataaacaaagacaaccactaattctaatggtattaaaagtgcctaaagaaacaatatgggggtggggagatgactcagtgggcaaactgcttgctgcacaagcatgaggacccaagttcagatcctcagtacccactgcctggcatggcagctaatgcctgtgatcccagtactgtgaggccgagacaggcaggtcctagagggacagtgggctctctctccagccagcctagctacattggagagctacaggttcagtaccagaccatctctcaaaaagtaaggtggagagaaataggggaagccagcaatgttgacctctggtttctgcacatgcatgaacgcctgcagtacacacacacaactaaaagacattatggttcttattggctgcaagctcaacagttactataaaacagttatttagtgtgttctctttgtctttagagaaaagacgtatataaacttacagaaatgtatcaataacatgaaaaatgactcaaaaccttttcaaagaaatgaacattcaagtgttgagtgtatcccaccagcaaatagattaacgtgctatgtaatctacaaattaaaagctacttaattatagtctaggatatttttcattatggttgtttatttatttctctgcctcctccctctcttatccaaacacgtgtgtgtgtgtgtgtgtgtgtgtgtgtgtgtgtgtgtgtgtacgtacacttgtatgaaaatgaaacacttattctcaagagtcacgtgtggctgatgactactgtaatgggtaaattttaacagagtgaaataaaataaaaacttctcacagaaaacaagatcaagtgtctgtacctttgtgatacagaaagatatcagtaatctacagaaagagctcccccaaaaatgggtacataaattagtctacaacaatattaaaattttcttctacttttcaaaagatacagttaacaaaataaaaagacagatccttctctaggacagcattattcgtgactcatgtgattgactaagagcttgtttctacaacatacaaaaagcatttactgggggctggagagatggcgcaaaggttaagagcacccactgctcttccagaggtcctgagttcaattcccagcaaccacatgttggctcacaaccatctgttatgagatctggtgccctcttctggtgtgcagatatacatggaagcagaatgttgtatacataataaataaataaaatcttttttaaaaaaagcatttacaaatcaacatgaaggaaaacaatctaataacaatttcctgttactaactgtggtggtttaattgagaatgcccctcataggatcatttatttgaatgcttagaacccagttggtggactgtttatgagggattaggaggtgtggccttgttggaggaggtgtgtcactaggtgtaggctttgccttttcaaacacccatagcaggaccagtctcactccttttatgtctccaactttttttttattctttttttttttttagatcaaattaagaacaagtttgcttcacatgtcaatcccttctccctctccctaccaacccccatcagccctctcccacctggcctctccactccccgtggagggtagggccctccaagggggctccccaaattccacaacatcatcctgggccgggcctatgccctcccccatgtgtccaggccagagtgcatcccttcatgtgggatgggctctcaaagtcccttcttacaccagggaaaaatactgatctactggcagaggccccatagagtgctgaggcctccttgttgacatccacgttcaggagtctggatcagtcctgtgatggccttccagacagcagtctggggtctatgtgctcccccttgttcgggccagctgtttctgtggcattcaccaacctggtgcctacccctttgatcttcattcctccctctctgcaactgggttccagagttcagttcagtgtatagctgttgtctccaactttttgatcagatgtaaactctcagctactgctccaatgtcacgactgcctgccaccattctccccaccttgatgatcatggaattacccactcaagctgtaagcaagccccaattaaatactctcttttataagttgtattggtcaacagaacagtgagtaagacaccaacagttccagtcttctccagagttctctgctgggtttgcttgtaggggggattaggcatactaggtttctattctctttttaatttaaagttgttttattgtttttttttcctcccatcttctttttgctcttattattccaggcattattctctgtgccttttaagtgagagtagagataaatgcacatgtgtttaattagcttatgagtgccctcaacaaaatatttaatgtctttatctacctacctgtctgcccaagtattatgagctgttcatgatcagtaagttattttactatcctgtctccactgctccacacacactggcaatgtgatgcctgtttgttaactgaaggaacaaatgtctacttgaggcacatgtgtagaatgtcctctccacgccacaagtttagcaaaagccagggtctcataagcattgctttgccaaggcatccgtttttcctagtatggtagagacttacttagcatgcataatgccccagcttcagtggcagtaccacaagctaaataaaaactaaacaaagccccaggaacatttggctaaaatcaggtatagatttcttattgtttaaaataacatactgttggccaataaaagagacatatacacacaaggacttcccccatcaaacattcggttatagtaggtgtaataaactacataaggatggatgagcagattaatgttcatgtttataagcctcagagtatcatattttctgtcatatttactaattatgcaattagcagggaatatatattatatgtgaaagggtggccggaacttaatcacatctatcaataaaagtcccattcactacttctcaatttctgagactccatttatatgcattgtcattttaactatgtggacatcactgaaatcccgaatgataagggccaatgcagtcagtttattagtttgattcaaatcattagacatcaactggtggagagcaacaattcaaaagtgggaataaaaaaagagaaagaaatagcaaatgacctatcatttagtcatagtcataggaccttagacgtgttgagaatttagagtccttacccaaaccaggcaggtttgatcagtatctactgcaggctgaattgagtagctactcaatcccattgcccgattgctactaagattcccatcgctttcaccaactttctgcaagcctcctccatgactttcttctgaaatttctcagaaaaatgagggaacacctttgtctgtattaaatctcatctcatcagaccccgtttaggaactaatacattgaattccatttcatttttcatacatataagtcctcaaaagacagatttttaaaaatgatataagaattgcctgttaagttaaaaatctctaaacacagctgatgagatgactcagtgggtaaatgctcttgctttgcaagccctacaggtacaatgccaactgacttcccaaaattgtcctcagatctctacacatggggctggagagatggctcagcagttaagggcactggctgctcttgcagaggacctgggttcaattctcagcacccacatggcagcccacaactgtctgtaactccaattccagaggatctgacaccctcacacaggcatacatgcaggcaaaacacataaaataatgcacataaaataaataaataaatctttaaatagctggggagatggctcagcagttaaaagcactggctgctcttccagaagtcatgagttcaattcccagcagccatatggtggctcgaaaccatctgtagggtgatctgttgtcctcttctggcatgcaggcatacataaagcagaacactgaattcataataaataaataaatgaatgaataaacatttaaagagagaaaaaacaaaatctccacacatactgagtggcacacatgcatctgtgtggtacgcacgcacacacatacacacacaaatgataataattaaacttttttttttttgagacaggtctcactgtgtaaccctggctgtcctggaactcacttcatagagcaaacaggcctggaactcacagggatctacccacctctgcctcccaagtgctggatttaaaggtgtgtgccaccactgccagtctcagttttaaattcttaaacacattttacttaacgcagaaatgatggtcagcaaataaacatttagagaaggatcttttgagaaacaaagacaagcagaattttgctgccttatgtaaccacacaggcatgcttaggagacagctcagttctgctcagtaggaagaattggcagctagctcctagtgactggacttttaagttaggattctgttggttttgttttactcaacaattgagctatgtggagtttagaaaccaaaaatgaaccagatcatattagaggtgagggagatggtttagagtcctagatgtattactcgtgagttggaaactttccttccttttgggaatattttctttaatcccaacgtgaacttcttactgaacttggctgtgagatgatataggattttaattagttacaaagaattttttgccaaaaaaatgtctgatatgatgatacacacatgtaatctcaacacttgggaagctggagccagaagattacaaactggaggccagttcattaagaataaaaaaccccaaaaaacaaaaacaaaaaccaaatcattaaattaatgctcattttaactcaaagacaaaccaaaggctctctcttatataacccaggctggttttgaacttttttaaaattatttttttattagttcaaattagaaacaagtctgcttcacatgtcaatctctgctccctctccctcccttccttccccaccctccaccaatcctccaccccattccccctctgctccccagtgagggtaaggccctccatgggggacacccaatgtcatatcatcctggacagagcctaggccctcccctgtgtccagactgagagagcatccctcctcgtgggatgggctcccaaagtcctttcttactccagggataaatattgatctactaccagaggccccattgagtttctcctcactgacatccatgttcaggtatttgcatcagtcccatgatggcctcccagacatcagtctggggtccatgtgctcccccttgttcaggttagctgtttctgtgggtttcaccagctgggtcctgatctctttattcatcactcttccctctctgcaactgggttccagagttcagctcagtgtttagctgtgggtatctgcctctggcgctccacctccccactgctgggactggaactcagtatttcacacatcatagacaagcacccaatgaaccaagctatattcccagcctcgagaggggtttacaactgaggagctttgtatcgcccacacctgtgcttctgttaggaccaggcccctatttggttgggattagattgtgccctcagagctctttgtcaaaattaattaaaaataaaataaaataaaaggctctctgtcaaatctgctcccttggggtttattttaactttatggcaatttccagaatgcaaaaaaaaaaaaaaagccagcctttgttcttaaatgctttcctgtaatctagggaaccacctttgtacctcagttaacacacatggttgctttcttggttgattttcagtttcttttttaaagagaacctttgcaggttcgaggctttgctgtgcagtatccggaagctgaggtggaaacaatgagcaagtttggttttggttaaagaagctttggtgtataaatgtctcaggtatctccaataaattggaggccaccacaaaggaacttagggtaataaatgcagcctctgagtacgcacaccctctgcccagcggggagcctctggggatcgtttgtctgctggtcattatcttgtctgcattattcaacagccctgttcttgctcaatgggcttcagagagcctttaacagctgcagcagcttccaatttttacttaagttccctttttgaagggggagggaaagccaagaaaaaaaaaaaaaaaagatagtgtgtctttgacagctaagagctacctgcgtgcctgcatccatatcagagctgtttgcttgactattttgcagtaaatgtatcgttgttctagtgtaggatttggaggacccagagagaaagcctccatttaaacactaagaatatgaggataaaaaaataaataaataaaaaataaaagtacccatgccacccaaataacagaacaaggaaggtaaatgtaaataataaatgctggtttcttgtaaacactaagcttaatctctttttaaatctactgtcctatcaaaagagagtatctctgaagaagggaagaaaaatggtttattagtctacccagaatttgatttgtttcaactaggacttgtttagctgattcccaagtaggctatttttcagaaaagttaggattattcatgacacaattgaataatcgcactctcttggatctattctcaagctgttatggtaaataagactgagaatggtacttcctttatgaaccagatgatgggtaaaaacagttttttttcagagactggaagcagagaatccacttacaaaactgaaggtgcatacaaacagaagtgctaaagatggctggcacgaatagattgagcacggattaaaacatcaaagaagctaatgggaggatgtcagggatttaccaaatgctaacttcacttatctgagggtcagagaactagtgaaaactttctaatcgagactatggggcactgtttcctacatttcacgggaaaaactattaaaaatccaaagatggaaggaagacatccatccataaagcagcatctagagttagcactggtctgtctgtgtgtctcatacagaaccacgaagtcacaccgggacagtgttatttgttactaatataaaccattctttagttttctataaagccgtatgttcggctaaaatgtgcagggtgggagtggggagaaacacttgcagacaaaatataaagcctttaaatttgctcctatggctcctgaattttatcaagagaataaagtcttcggaggttacagtccgtgtgtaataacaaggaactgcaatttcttagcattagatcatcgaactaaaaagcaaggagcttttcggcaccaccatttttgatcagattaagatccttagttttgtcccaatctcagcctgaagcttgttagccacccaaagtctgaaagcggtctttaaagtgtcatagaaatgctaagtagtctcaggcacctgaacaatgcctgactccaaggaaaatgaaaagccatctcaactatcagcatatttgttacttggggaggaaaatcgagataattaactgagtctgtgattggaaatatgtaaataaaggcctgaaacttttatccaaatccttgatttggttttatatgcacattaagtgttcctaaagcaaatatgacctctgtcacttgctctctaagacttaagatgtcagtacaacaaaactacagatgctgtacacacgtgtgtacatgcacacacgcgcgtgcgagcgcacacagacacacacacacacacacacacacacacacacacacacacactctttccaaaatctttctgaactctctgaactgataaacgccccaaacttggctgcccttcagtctttaaatgtcagtttgtgacggttgaatttgctcttgagtgtctgagcccatgctacctctgccttatgtgttaattccctcccttaaagggcgtgttttaagtaactccagtctcaggatacaaattctgagattgtgtgaaagtaagttctctgtcgctgggtatggtggcatatttctttgatcacagcactttggaggcagagacaggcagatctgtgagttccaggctagcctggtctacagagagagttacagaacagacagagctacacaaagacaccctgtgggaaaccaaaaaaacaaaaacaacaacaacaacaaaaaaaggtctgtgtcttgatttttgtttctgcatttttgtttgtttaatttcactacatcttgagtctcaggtttctactgtaagggtaaaaagaaatagtcctttatttttttaaatttccaaattattgataatctagacaataaggaaaccccagactgtcctgaatgtattatttatacccatgatttcttttaaaggagataaagcttacaatgtaagaaaagctaagctgactgattgcatgtagttatgaagacagaacagtggagagggcagaaagaccctgggaagaaaccctaccatgctaaactaaaccttaactccacagttgtacctgcccctctctgaccttcacaccctctcagaaaagacggtctctgacttcatagaaactgcaagcattttttgatcagttaacatttccacaaatactgcagtagtgtctgcttcacttctacttcaatcagtacaggacaattaaagggaatttaggaaaggtgaagagagatcagggaactgtccttgaggtagttcatgcttctttttgtcattttgtttgtttgtgtttataacactggggattgaacacaggtcttgtgcaagcaagcaccgtgcaattgaactaactatactctagctcatgtttcttttcttcttcttttaattcatgttgtattttttctgtgtataagtgttttgtctgtatgtacgtctgtacatcatgtgtgtgcagtgcctgcaggggccagaagagggtatcagatgccctgagatgggagctaccatgcaggtgctgagactagagcatgggtcttttaacagagcagccagtgttcttaaccacttagtcgtctctccagcccctgatgctttttaactgataactttgggcagagaagtatctgtgtgtgaaacaaattctctctctctctctctctctctctctctctctctctctctctttctgtgtgtctctgtgtgtgtgtgtggtattgttgcttcaggattcaaactaggacctgtgtatacttgccaagtgctacagcactatgctatacctacacccttagagagaaataagttgttaatgaatgtaggtatcactacaattaaagctcagaagtttgcataaagctttgctgagtatagttcaattcctggtctctgtggccatccatactcactgagaaaatagagcatttttaaaaaggaactcagacacaaaaagacatatctatcacatactacacctggaatctgcaaatggttacccaggaatcaagtacaacccattggctgtatcacacaaaaagtaatacagttttatagttttgtttagttaaagctaataaaaagaaaaatattcatgacccataaaatcaaataaatccaaatttatatctacagtaatgtttcattgggacattgctacatttactcatttgcatattgcttttgtacaacgtcagaagagaacagctgcaacagatgtcatctggtcagccccatctaaaatagttcttatctggcactctacagaaacagtcagtggtccttgagctggacactatactagcatatacatatttgtgtatggatatgcatatatacagatgtttatatttaaatatatgcacacatctgagtatttatgtttaaatacatgcatgtgtatatttgcagctaagcagctgtagttccaaagcattatagaatttgaataccactattgaatcattcatatagtttaatttcatttcccccaaaggaacatattgtcagggcaaataattattaaatttatgattactagaatagtataaaatacatacttccctgttttttatttcttgtttttacaataatttctttctctttcttcctacttctttataggctttataaaattggtctctataatagttggaaaattccacagccctcagaaatagttgttttgagtgtagcttcctctcaggcaggtggcactaagagttctgtaatatatatactttcccaaacaaagctgcaaacttggccactgaagcagctgtaaaaatggaaatgcaatcacaggaggagttatcaaccttatgaattgaggcgccttgacactacttgacattcattctcaattaccaagttcaggcttcctgcctccattgagaagcactacagagtactgcacatacatgagtggatgctgggcggccatgatggtgccaggagcctgttctcctcttcaaagggcttggctcagccaacaaagctctaagcactaaattatgtctgacagcagccactggcctttagaatggatctcacctctctctttctgatgtttatctttcagtgagaaaccactcacatctttattgcagtcataaagtctgtcgtgatgataaaaataaaaggcatttaacctgtacctactcactggagcagagctctgggtataactgtctcctctttgactttcttcacttctaagttacaaggtgcctgtgaaaggttcagaaggaagctattgaatctatgcaagattccaggatgtgacaaagaaattctgccccctggaatatcaatggaaatgaataaagaatgctgagctttagccagacattcatggttttgttataatgtttatagtaactgcaacaattataagatgcagaaatcttcatggcttctttggaatctgccacttcataacgctacgcaatgctagaaccccaaagaacattatgtttcagacattatgtacaattattgtgttcaatgattttaaggaaaagaacacagtgatttgagagaataagaatgactgttaagaagtaagcagtgtggctgtcagcctgaagggattctcttgaatccaacaacatcattgctatcattgtcattgttgcattgctgtggtcatcattggtcaacgtgtaaggggggggctgcatgcaggatatttacctacatagaagtttcactctccaaagagtaaggtatttacctctactttattctactgggcaaccctataccaaggactcccgtcatccattaattgagcatcctactcctctccctgactctgactctctgtgtcacagttctttaccaaaatctacaaaatgctgcatcctgaatttcaggatggttctgtcttctgggaaagtgtttaatattttttaaagaaaatccatcaccacattttaattggccatatcccagacctagtataaccaaagaacaaagaaacatttgagatatcccgcaaataatggccattcaaagaggcataattattccaactaaagcttaatgaaggatgtggaagagggcaatgttgcatgatgtaatttgactaaaggcctcgggttccacaattccttccatttgtggcaggaggaacttggcaaagacatccaacccaggtgcctcatcaatagcatagggtccatagctaggggctgggtagtcaaaacaaacttttacagaggccatggcaaacaaacaaggagtgagtggtcactttgagggaaaggagaatgggagcttgctttgtgtggtttgaatttgaaatgtctcctgctggctcatgaatttgaatgtttggtatccaccttgtggtcctactttgagggctgtggaaccctaggaggtagagcccagctgcttaaacacaggtcactggggccctttgaaaagtgtagccaccattggttcagagtcttacgctctctgcttccccatttatctcaggtgaggaagcttctcccatgcattcctgccatcatgactcctagcaagccttcccctctgtgatggactgaatcctaccaaaactagtagccaaatgaaatcttccctcccataggctgctatctatcgggtgttttggtaaccacaatgtagaagaagactaatagagagtagatggatgcttttgatctgagagacatggtaaagccgcacagaaaacaagcccagtagtcagaaggcaaaggaatgtgttgataaatggaatgtaattcagttaaagataaaaatattcagacagaaggtatgagggtgcaggaatgctgtttttatagtgttctgtggcaggttcacaaagttactgaatgtgttatagagggaaatgaacagcatttctcattcagatgattgttttagagaagagaaactgatatccaaatagctggcccaataatatcacttgttgcggacagatacatcaagcaaacattggaacaattgagtcttactctgaggttgttaacttgtttgttacagctattaactgtagctgggcagtggtagtgcacgcctttaatcccagcacttgggaggcaacggtaggcagatctcaatgagtttgaggccagcctggtctacaaagagagttccaggacaaccaggactattacacagagaaaccatgtcttgaaaaaccaaaaagaaggaaagaaagaaaaggaaggaaggaaggaaggaaggaaggaaggaaggaaggaaggaataaaactaactgtaaagtaagagtatacataaagaaatagtgagaataaagtgtgttcctggtttggagaccttaaaaatggtgaagaatagatggaatttaagaaacatcaattcttcaagcctaaaagatgaatctataaaatgttggattgcatatgtaggttgacatgtgttaaaattacacatgattgtgtttggtggagatagtgttgatttattctctgctagaagtaagtctggaagagagggagtggggagggtagataatcccccagcttgttatgtaggcatttcagtcatttccttggaatagggatgtttagtatgcttaaagaacatattaaaatgtgaattatatacctactttcatgaagacaggtggtataacagaaccctatagtgtcaaatttcaatgctagaaaaatgaaataagtcctacaaacctcttgaggctcaaggatattatttccctatgtaataaataaggtttgctattgacacaaaagacctgaagctattcatttctcaaggacattattatggggtttgttttatgatgaaatgtttaaagcaagattttggaaaataaataatagactggccctcagcttctacaccgtgttcttatttcttctgtctccactgtctattattaaaaatgcatatttacctctctagttcagatgactatcattttccactttttcaatgttgataccaataagtagcgtacataataaaataaaaaccagattacttatatgggttcaaaaattaatatttttaagatgtattttatttttgtttaggtgtgtgtgtgtgtagaggtcagaagagcgcatcagatcccctggagctggagttacagacagttgtaagcagcccaatatgaatactaggaactgaactcagatcttttgcaagaatatcaagtactcttaatcactgagctacttctccagctcttctacccagttttcataacacataatgttaatagagtttagaaaatactttaaaggctctgcctgaaattcatgccatatgcttagtttaaaacataattttgcaactggagagatagctcaatggttaaaagcactagctgcacctttattcccagtacagaaagaaagctgaattacaaatgaaagaaaaattgagaaaaacttcactgaactaatgaattaatgagagttaacattgtaaatgttgagcaaattacaataaaactaagtaggacctagtacagagtcttgactgagctcacttcctgaagtggcacatactccgttttcattgaacacacacacacacacacacacacacacacacacacacacacacacacagcttttagaaccagaagtaacttcctatacatttggcatctcagtcttcttttctagtttctgtttgcttgtttatttttataaaataagtatatctcatatgaaatctgcattatttaatcaacctaaatcataggactcatgaaaattgaggaaatgtgtctataaattaatgaaatacgttaatatttaactataggataccatggcttctttcatgtgtcagaaaaagtcattgtcttattacttcaattgcttattttatggacatagaaaacaaggctctagaggaaactgccaaagttggagctaactgtgccttcctttgttagcagaatatatcattcactaaactgtgctgacatcctaaattttggcactccactcaatagatttttagaagcatactatgtggctactcaatccaatatttaagcatggttccatttgcagggcttgagggagtgtccattctggctgagatactcagccatttgatttttgttcgttttattcaaacctatatagaagccagtatccaaatttgttaaaagacaacagggagtgatgatgattaaaatacattgaaagtatatatgaacttctcaaagaattaacaaaaaacatttttaaatgaatagtgaggacaacaaaaacttactttcatatctttaaaaataaattaagaccatccagtttttcatacacccaaagttaacatcttttataacttgcaataaatacataaaatgaacaaaaggctacaggaaataaatctactttgaaggctagttgcataatataaaccttaatcatgtgatttcctgagacatatctaatgaaagatatcattgctgagtaacttcataaacattggacagtctccattatttgaccttactacacagtaatttttttattaatcagacaacaaggtgataaagtgaagaaaattttatcttccaaataaacatactttattgaattctatatgcaatcctgagatcatgttttacactcatgctttacatggttataaacattttttttcttattacttcagttttatattcttattataatggttgcatattatgctaacaaatatagtttttaagtatgactttagctctttaagatgaactgcaaaggcaatacagaaacattgttggtagtccttgaatgtttgaaagtattcgattcaaagtcactaagaatattttccagataggtttttgctgttgttttgagacagagtttctctgtgtagccaggctctgtagaccaggctagccttgaactcacagaaatccacctgcctctaccacccaaatgctgggattaaacactcaaatcatcacctggcccagatagttatttttaatctatgctcttttaaagcattgtgatcccaagaggtgaactaactgaattaatcttggaactcagaaagtacaatgaacagaaagtttaagtttacaataaacagcaaatgttttgatgtgcttaacataaaattaagttagtatgctacatgcttgtttaatagatattttaatcctttacttctataagaagagattaaccttggtaaaatcagaatattgtcaatttttaatgaaaagagtgaattccctactcatggacattatcatactacatatgctctcctagtaagatatctaaatatagcatctgtgtggttctgcagccctgggttttttaatgctttcattgccaccattgcttcagtctagataacagtatgatttcatcctgagatcacaccccatgtaagcacacactgaagcaaaatttcacatctcccaagcacaacccattttattgagctcatttgtaccaatgcagatcatctagtgtataattggctattcctgtgcaacccgtgacattctctattattagcaacagggcagtgtttggaaatccaaacatataattacatgctgcagaagataaactgttttggtaagaaaggatgtgtgaaacaagttcctgttccccacttcgaacaggtggtgagcaaaatgcaagagctgccatccacttctcttctagacaatttggaaagacagggagagaaggaaggggtgagagaaaggcagggggagagaggaagagaacggaggggagagggaaacagggagaagaactgggagaggaaaagaaagagaaaggaaggaagaagtgtcttctgtttgcggaaggcaaataaacaaaatattaaagagacccataacccacctaatattagagaagatggaaaatgaaatcaaaatataaaatgtcaaaggaagacactaggaatagattaggaaattcaaagcttagttttaaaaccatgtgaaccaatatgagatatattttttgcctttaccattatcaagattaaaaggaaatttatttttcagtgtgagcagttcagagataaatcattttttgcctgtggggttttgaataagaatggtccccataggttcctacatttggatacttggtcccatttggtggaactatttgggaaggatttagagctagctgtgtctttgtttgaggaggtatatcactggggtggtctgtgaagtttcaagactcctgccattcccagtacactctctgactttccttgtagaccaaggtgaaagatctcagctgtttctgccacagtcatgaatctatttttcagaaatcataaacccaattaagtgctttatttataagttgtcttagtcatggtgttttatcacaacaacagaaaagtaaccaaaacactattttttggagaaaatataatctctgagtggaactggagaataaaattccattgttcagactcatgtaagtataaaatacttatataaatatgaaaatatgtatatgaggatgctcttcgtagatagttaacagtcaagaaaagttcaggacaaccaaaatacatgaaacattaaataaattgtcacatagtcatactgcaaaatagcatgcataaatcagaaataatttttaaaaatcatataaaaaactgtcttgtagtaggaagttttctctcctgcccatcagttcctgcagctgcttatgaaacaacactgtgaggtctaatatcaactacaattgtttggccaatggctcagacatattactggctagctgtcttttataaattaacccatttctattaatctatctattgccatgaggctgtggcttatgggtaatactctagcatattactccttcggtggctacatggtgtctctttgactccatctactttttctctgaaactttgtttggatttcccacctatctatatattccctggccattggccaactcagctttatttatcaatcaataaaagcaacacatattcacagcatacagaaggacatcctacatcactctccagtactgggctgtagagattgttcagtagttaagagcacttgctgctcttgtagaggaccaggctttggttcctagaatcacatggctgcttttagccaactgtgactacagtttcagggattctaacactctcttagtcctcctcgggtaccaggcagatggttacacacattcatgcaatcaaacactcacacacataaatgcaaataaataaaccttctgcaaaaacaatatctggcattgtaaccatgatggtgccataagtattataataatgatggtaccatgagcctacccagtactaaccatggtggtgggtacttgtcattgtgcatttgtcaaacccatagaccatacaacagcaaaagtgagtcctaacataaactacagactttgagcagtaatgatgtaccaatgtaagcaatgggctgtaacaaatgtatcagtctgactggggtgctgttcctaggggaagaagactgtgttggggaacaaggaatacaggagaatttcctggagtttctactctgctatgaacttaaaactgctctaatttttttaaacaagtaaatctctaaaaattcttttttaaatcaaagaattataaatcagtagttttagaacttattttccatgctgtactaagtttactcctacaagtgttataaggaaacaaactcatttttcaagactttattatgtaagtaatgttttcatctgaagatgagaaaacctgagttggagactaaacacattgtccaaggatgctagtaaaggccagacctgagttctaaacccaactcctagctttcagagtcccagagtacttggaacttattaagccccaatgccaagtgttttgttttttacctttctctgtcttttttcctctttctgtctctttcctgccctcccttccctctcttgcttgtttatttctatttttaatcttgagacagaatcttgctatgtagccaagtctagctttgaattcaagatcctcctgcctctgccttctcaacacttggattataggtatgtgtcacattgtctggtccaaggtcaactcttaatctaaatactcaaagtctaaattttcaaggtataaaatgatctaatattagaaagaggaataacttagtaaacacacacagagaaagctataatgtgttgaccaactgctatcctttacctgtataaggggaaattagggtcttatggcatcctctgtttctagactgttcatgtttttttgcaataaaagtcattgttttataataaaatgcttgctgtctttaaaaaaaggttgcaaacaagcactccaatatgactgacatgcctttagtcagtactgggaacctctaaatgcagggattctcaaataccagtccatgacttcattacattcacccaaggaatatgttgttgcacacgcctcgtctttcacttcagtgcgcatcctacacagttcagcacatctgggacaaagctctgaaatttatattttttacaaagttccccaagtgaccctgatactcaggcaggcatgggaatcactgtctaaaggaacatgatttatgtagatcaaatgaagtaaaagaaaacacaccatatggcatgttaattatttaatcacatttcaaaggtagctctatatgaaaagaacacttaatttaacacacaccttgagcatagaaaaggtgactacagtctttttcatctgggatgtgtaatagctcacctttaccttgcaatggaggggacttgtaaagttcacataggaggtgacataggcctagggttagacatttagactaacacagcaacacaaagagcacagaaacatcacctagcatggatcggagcttggcttagtataggagtggccatggatggatgtagaggatggcactgtccatccagtagtctcactccatagggagctgatatcaacatttagcagagtgtcttgcatcactttctctctctctctctctctctctctctctctctctctctctctcgtctgtctcgtgtgtgtgtgtgtgtgtgtgtgtgtgtgtgtgtgtgtgtgtgtgtgtctgtctgtctgtctgtctgtctgtctgtctgtctgtctctgggtgcgaatgcatgcataagtgtggattccagtgtgtcacggcacatatgaggatgacaaatttgtgtgtcagcctccacttctcacattatttgaggcgagccttcttgatcaccactggctgtcctgtgaatttacagggatctgagctcaggtcctcatcctgcactacaagagctttactaagagcaatctccttaaccaagtagtagctttttctaaaacaaaaccaaaacaaaacaaaaaccaccagtttcctttcacatatgacttcatctggtcctccttagatgctacctctcattcgaagtccctgttctctgtcctctttcctcggttgtctttcattttctgcataccatccttaccatcatgaatggtctcaccaattatcatgactttaaccaccaaagacaagaatcctcaggcctatgacttccagtggaagccctttcctgaattccagacccatatttccaaatcttatggtataggaatggcatcttgcatcaaatatatcttcatgtaatcttatttcaatacttgctctgttgtaattaattatgaatgaaatcaatgacatcatgacccaacaaattcccgaagaacaaatttgtgcatcttttataactttatcctttccctgttaactgaccaccagattctacagtttatacctaacatatatctgacaactctcacccacattattgttgccttccctgaggtccttaccattttcactctttatctctaagcttctatctcatctctctgctttcttcagcccatggtcccctttattcatcactttctaatatagaatgattcacctttaaatacaattggttgaaaaaaatcaagccatatacgttactatccctcttaaaaattggctcatcaatctttcataattatgtccaagttccttatgtgagaaaggataataacagaagacaaatttgtcttatttggggctctttgtgttgtggtttttgtttctcaggacataaaatttgttatatagcctgggctagccttggactccaagatcctggagcctcagagaatagagagtatgcatggccacaacaggctactaaggtgattaacagtagcaaagctggggtttgaatccaaccctatggcccatacttggtttgaatgccacttccctgacataacccacacatttacagatctgtcccaaaagtcgggaatggtgtcatggtcttacttgtgtcctgtggcttgcacagagcttagtgtgcgctcattttcagaggtggatgaagaagcaatgaaaggatggaaagaagtaattgggaaagcagtgaacgtgcttagagaagaccatgttgctgtttaaatgttgtaggaattgtcacatgaaagcctgcttcttggcagagcaaggggacttcaccagggagctggggacacagtgcatttctctgggatgaaagcctgtaactttcatgagtctcatgaagctgtctgtgatccaccctaaacatgtcagaaatcatctctccagagaagccagtgagcagctgttaccaagagaccaatttcagatctctgaagggaagagatcagttaaaagacaaaaaaacctttaaacaaaatgtcaaaagttctggaccctggaagcagtcaagcagaggccagataaacataagggggaaaataaaaagaaagggatttccatagataagcaagggaggagccaggtgtagtagcactggcctttaatcccagcacaaaggaagcagaggcaggtggatctctacggtggttgtcaacctgtgggtcacaactcctttggaggctgcatgtcagatgtttacattacgattcataactgaagtgaaattgtagttatgaagtagcaacgaaataattttatggttgggagtcaccacaacagaaagaactgactgtattagtgaagagcctctctcaaacaaaaaagcatgatgggtaaaggctaccttaaaaaaaaaaaaaagaacaacaacagcaacaacaaaggccaatgaactccttcatcctctaagattccactaattctatgatgcaacctgtcttagttagggtttctatagctgtgaagagacaccatgacgatggcaactcttttaatggaaatcatttaactgggactggcttaagagtttcagaggttttagtccattgtcatcatggtaggacacggtggtgtgcaggtagacacagtactggagagggaactgagagtcctatattttgatctgaaggcagcagaaggaaaaactgccacaaagagcatggcttgaacatatataaaacctcaaagcctgcccccacagtgacatacttcctccaacaaggccacaactcctaatagtgccactccctctggatatattcaaacatgagtgtaccaggctttcttttttggaccaccaaccagctcccaaatcttgacacagatatcttgttagttataatgctcggcctagcttaggctcatttctggctagttcttttaacttaaattgacctgtttctctttatctaccttttgcctcggtgctttttaccgtttctttctgtatgtcctacttttcctgcttcttccttgtcttactggctggcaactgcctggctggctgaccccaggcatgtctctgtttttctccctcattcttttcttcttctcttctgagcctagatttctccttctatttattctctctgcctgccagccccacctatcctttctctgcctagctattggccattcagctctttattagaccagtcgggtaccttaggcaggcaagatgaaacagcaacacatcttttcataattaaacaaatgcagaagaaacaaaagtaacacacctttacccagttaaaataatgttctgcaacatatacaaatataacacatcttcacgtagttaaatattccacaacacatgagtctttgggggccatgcctattcaaaccaccacacaacccataataaatttgtcttttgtcccccaataaagactttaatcttttctaaagtatcgtggcatcatttcagttagtcctaataatcactttcaggttcctttggatttcttagtaaacccaaacaactaaatgtaaattttgctgaatctaaagggactagtgacttggtaatttctacttctttttttcctacaactataaacacagattaattgcacaaacaaaagagaattactgcagtatttctgtacaagtgcatgcatgcgctaccatgtctaccttctctctctccttccccctcctccttgccagccctgtttccagtccctagtagtcccttttctactttcaggccttttcccacagatagaacacaggctgttcttgccttcctgcatctgaccaatttcacttaacacaatgtgccccctcccaccattttccatgaatgactgcatttcattgtaatttctcttgttggcactacgtcatactcactctgtatcctgcctagccgcctgtcatgtttcttactttacaagttagcaagagttagtttatgttatatttatatctattaaagttttgactccaaagcacaaagtataaaactaattgttctatagaccaaatccagtccaggttactgtactaggtggagcttctttttccccttaaaaacagatatttagctcataatcactggtgatataacaaaactcccaaaactttttatgtttattttctccaaattttgcttcatagtacataggagtttccccaataacttctgctcatatgtattccattttatttgcttcctcagcagtcagcagagcctggcagcccaggactatgatcctgctctttgagaggttgaggtggaaaataggaaattcagggcctgcgtgggctcagcaagagtctcttttaagattaaaagaggaaaggatggtggggaggaggggttaaaacatttgtttagcaagtgcaaggcagctttgggtcaatcctggttacaaaggagggcaaggagggaggagagagaggggaggaggaaaacgggaggagggagaagggagaggaggagggaatggggagggagaggggatacaggagaagaatagggatagaggagtatagagaggaagagggagaaggaaaaagagggaagagaggaggagagaaagtggagggggaaggggaggggaggaagaagggaggagggacaggaggagcaccagcaataatacattttaagatggtggatttaggtgaatatggaagttatccagaaaataatgtaaatatttcacgtccgtttcttcatgtcctaatactgctacatctttacctaaagagcaacaagtacctgtagttttatcagggagcagccttcagagtaaagaataaaataaatgatccttgtttggcacactgtataatcatggaacacattaaaccttttcctttgctgtttcacacagccagcctttcatgatcatccttcctggaggacaagcccatgcgagaaatagtgaaggaagccagtggaaatttcttccacttcttagagtctttttttttttacctttagaaatattttatcaggttggagaggtggctcaatggttaagaacactgtctggtctttctgtgaactcgggttcagttcccaacaccgacatggcagttcacaagtatctgtaactccagtttcaggggctctggcaccctcacacagacatacatcaaggcaaagtaccgataaaataaataattaaaaattgtttttaaaagaagcaaaaaaaaagatacgttttattgacctataattatcatatacatttgtagggtcattgtgataatttgaaacaaaggtcagatacggtaattatcatttgatctatggttgtggtgtgtcttctctcctagttttttataagacatatgataataacacttgaaaagctgatgcagaagaaccacacatatgaggtttatccaggctaaataatgagatcttgactcaaaaaaaaaaaaaaaaaaaaagtagtaagttgtcactctactattctgcagaatattagaaaagcaattcttcctatgcagcttctttttcagtacccattgcctaggctccctcaggacctctctgttttcttcccctccttcattgtttttatttacgcaggtcaaagaaaaatcaaaattctgaaggtgtaaactggctatcttcttgccaatacttgctgccacctgctggccaaagcagaaaactgcaaagaatgactaaacgactaaaaaaaagtgtaggtatggtgaattttgtgatagcctttatatgtagctgaaaggggctaattaaacagaatagagcctttaaaaatactgatattccacatttataaatagtgctagttgactattatagaaaagaaaggagtacatagctgattggtgtctgcccagggaataagtacttttcctgttcagctacttctttatttcaagattccccctcacctccaaagtttcaaagtcatagagaacatttcctaattatgatgatcatgtttcctaagatgttgcctcaaggaaaagtggttccttttatgggatattgaaaattggaggattacaccacaccagggcctagacttagcattttataaaaatgcaagcattagttttaaactagggagctcatataaaacccagattgatatattctgtaagagaagtggaagactggaccactgtggaccctgtttccacatggccatgacaggatatggctgagctcaggagagacaagagtttttctgcccaccacagtccctaccacttcccgttacctccatcccagaagccatggtcatttgccattcatcgttcttttcttttatattaattttttaaatggaagcttttcttttagcccaggaaaagcagcacctactagttccctaattttgtgttctactttttgtcagtaactgacatccattgtcatgggatgatactgttctgactaaacattctatttcccacccttttcacacattggtaactaaggaaacacgatgacaagacttctgaagtagtctctaaagatgactaacttgatgctaaggaaatgactcccacagacccccaacacatcctttcttcgtcctttgtcttcctgctcaaagaacagatttgtatgatggcaggagtttgggcaactctcttggatcctaagcatgtgatgatgaaggcccagggctcaatttgatgaggaaaaattgcatttgtggaactctctacacaagttacaggcagatgggccagcaggatagtcttctctccttagaaactgttactgcttgtataacctcctggagggcctttctggatcttgtgcattttaggagctttctgaatcttgtaagtttcatttacttcctgagtcttatgaacatccctttcttccccagagaagggaatgtttcaactcagaggaaatagttacaaaacactctaacctgtcctatggctcttgcattcattccatgcctttttcataaggtgctcttgttcttggagtgagtgatacaaatgtctaattttccttcatctatacctgagcattggaccccagtgtctacaaagtcacttattctcagaaatttgagtagttatgagtctctgcagtaactattgcccattgcaaataataaaaacaaacctccaagcatgttgcccttcatggccaagattggcagcgacagtaatctagaggtttagacacaaatattttagatggcagtttagatacaaatgttttagaaggcacatcacatcaaaacaatagcagtcactaccttgctgggatctatgatctacttagtcatagattgttgccctgtttacagaatcagttgtgagttcccttctgtggcacagaccttgaatccagtcagcatgcagttagttgcatccacaagagttatgctactattgccccagtgaacccatcttccctggtagattggcaccatggcatgcaaggcccatagccaagcaggacttgtagtgataattctccccaagaagtctgcatgacacctctttatactgtgaaagcctgtcagaatggatggagcctccagctcagtctcagccttattttttcatgtcctatagccaaagtatggtgggtttttagcaaaagagactcaccatctagttctggaaaacaaagttagcaatgtcctcaggggcctcactgactcctagggaggtagcacacatggctcactgaggttttcattcaattgccttatgtatcttggagtgtatttttcatgcttacaggtatattcattcaaactctttcacttctcttttacttttatttcaaatgtttttccaagtctgtaagacagtcaatgcttagtatttattgtattatataacgaaacttttttttaaacaaagcctggccagcatctctgaagacccactattggtcactccaagcaagtcagttgctcatgaatggctaagcagatagaatacatcagtcaataaataaggataaaggaaggaaaaccaagtgttaaaaggatgaacacaacatgaaaacaaattccatcacatgtatcaaatgtttgttatttatcacttctgtgaattgttgctcaggctttcaaactttccagaagctaatgctgcatttggggttttgttaattttcccccaaggaacttcagctctagacaaagcttgccacacttgtctttgagtgatccaggcagacctgctcatatgcattaccgttatctcacctgcctcttgcttgccttaacatttcacaaactttacattccaatctaaattgttcagatccaccaaagtctctcctacctcataaaaatcatgtccctccatggagcttagcaaaagccactagatccccattctactccttagatctttactgggttagccccttcttcagttctcctatctgacccaatgaactgggcatcaaatacaacctctatcatgtccagtttggtcagtaactccaggctttcttctattgtcttctagtccttggcattcatagaggcctcagccagtggcttgccacgtgttcctagtggctcttttgcaccagttcatcagagaccaatttcctttatagcatctcaggttattcaccctttgtctcataaggagtgcacagttttgctcattttttccactttcttaccgtctacccctattacttatagcatcacaagccaggatatctctttcattgcttgtttaaaagtcttgcccaattcaagttgttcaagggcagagtattccctgattaccgtgttttcttgcactgctgttattgaggccccatttgcatggtgaatcatgggttttcctctttttccctactgaaggctgggactgaggagtttcttctatcacttctaccacgttcagttcttcctccttacttatgcccatgggttctgagcttttggattccaggagtggctctttagcacagatataatttgcactctctttttttgaattctgccaggataagaaatggtaagccaatacctccatccccttcacccatcttctcccttccactgtgaaacctgatgctaacgcagtgggtaagttctttctgggaagataactgagcttcaacttcacatcttgtcactcacaacaaaggccacacacaagtgatatgctagtcatccagtctcatacttgccaccttcagggacttccatatattctccagtccatcaaagactttggctataatccatactgggtggtagacctcactcattgagtaggcatgctatgagaaagagggctagcctgtaattcactacaaggttactccattctcagatggtctggccttgggtacatatcttattaccccttacaaggagtgcacaatcaacactacagcaagcaggcacaccattccatatccatatggggaaatatagccataattggactgccccctggaccctccaccctcacatgaatcaacctcagttgtataaatcagcacccactgcagggaccatacaaccattactcccccattcacccttggtttcctcagttccggttgaggggccaactgcttgacttttctggaggatggagtggagggtgaaccaatgtctattcaccccatataggacaccaacaacagagcaaagaaatgattctagccaagtatcccttagtgaaccaatgagttttattgggactattcacagaagaagcatgagcgagagattagttacatgagcatgcatgattcaaaggcgatggcactgttgtttcagtttacttttctcttgctgtgctaagacaccaagaccaaggcaactcattcaagatataaccaattgggcttataagttccaaggtgggtttgtgaccattatggtgggaagcaaggcagcaggcaggcaggcatgacactggagcagtggctgaaagtttaaatgttgagggaataaccttaaggcagacagagagagatggggacacaaactccacctccaatgacacacctcctccagcaaggccacaccttttaatccttcccaaacaattctactaactgggaactaagaattttactatatgagactatggcagtcattctcattcaaatcaccacatactaccaaaaagtccacaccagcactagtgacaacttaccatatgtaacattgtctgacaatccacaggctcaaggcaaaagaacctcaaaaagcagactgctgataaacaaaatccctggctgaatgaaactgacagctggatctctaaagcatggaagcagcaagtgtagcagacaaagatcactgtggtaaccgggaaggaacaaaaacttctttactaatttccccatctctgcatagacagagacatgtagatctgactgtgaacttttgacaacttttggtaggcttgttgttcttcctctctaccacaagatttgacagcttttctctaattggttctatttttttttctacttatttaactacattgagtctattaggacccatctggctgacaccttataaatttggacactttgtggtttcagagacagaagcaccaagaacttgaagtaagataagacaaggaagcctaatgcagcccaagagttctactcttcaaggccacctccagggtattacaaaatatttcaatactttctgtcttctttcttatcttttttctttctttttttgatcagcagcaatatttagtacatagttaacagaaagatatgaaagtacctcaaattctcaaagaatgcctttttctcttttggtccatgtgctgtctccagttccactggggaaaaaaatgtgagatgtagctttgcttgcaggaagtttatggggcattatcttgcttatcaacttgcttataagggagctatggaaggttacagggctgagagagaaggttaattgttgagcaactgcagccaaaacatttactgggccaatcaaagtgttgaagctgggacacttttcaatagatattctccatcaaaatgttccatttgaaccttcatgcccttgttttaacctgtcagcagatgtaggctcttcctggggagggaagtcataggcctggaagagacagctctcttctgcccaggggaataggcaatgggcaactcatttataaaccattggcggttctcagaagctaggggatactcttcatccagagaggaaaatggacagttccctgcagcatcctcttgctattacctttctttctcttttcctcctatcttcctccttccttccttctttctgtccttcattctttcatttctattttctgcctttttgtttgtggtatgatagttatttccatttccttcatgagtcataagtaactattcttggtcctttgtttcaagttcttggatcaaatacagagctgaatttaattactaggattagttactgtgaacaagccaaattaaatagtaagttctatatgttctacccttttgtataaaaagaataatggttatgagtgaataaacaaggattagtttaaatattgtatttggagggccaggtgttcaagacagacagataccagtaatatgaagcaaccagggacaaaggaatgttttttttttcctcaagaaaaatgcctgctgtggttcccacaaggctttcctaatccctgacacatccctcacctcccatcatgatgactgacatgcagcctctggctcgccttataatgctctcagctgtgctacctccttgccttcctaatgattctcatatcgagaagaaacatgattgactttcattcattttgaggccagagctcacagtagtagtttgtatttctagccaaggtaagcttccccaccatatggatgttaattacagactcatgttagctgattgatttaaagtgagggcaattgaatatatccatggttttctgccggtcctatgcaatgccttttaattgcctgcataaatgtgtttaatggcctctttaatgcagaaaatgaagctttaaagtagatcatttgggaaattagagagttaaagattgaggtggaaattatggttgagttcaacagtgattaagaacctagtttctttaatagtattaaaacagaacacttaaaacaatctgtatattaaattatatatctattgcatctatcatttagttaggggtccagtgaaacagataaataaattcagctaaatactgtttatttacaaccacatccaaacatttttgcagattcataggatgaaatcttttaatgaaattcctgagggaaaaaacactgagatagatgaaggtatattaaaataactagcagcacattttatcaatattgtttcctttatgaatcattaagcaaaacagtgcctcagaggtcccatggatctctgtcttgcttcaacagtgtttggacagaatgaacccaaagaccccctctgctagcttccagctgcctttccgtcttcccagtcacagcctctgggactatctcctcaccaccttcgactttgaggacccgccacacagtccctttactgtttgctccatactgaagatcagccttgacttcccagattcatcagaatgattccattgaaatggaagctgcagtgaactgcctggtcaccttagccctgtgggcctcctacacctatctctgggctactattttgatccgcatgacgtggctcaggagggtgtagaccacttcttctggtaattggccaaggaagactgtgagggctcaagttgcagaccaatcacaggggcgtgcgtgcactctcccaagatgtgcagtgcactcttccaggatgtgcagaagccatcttaagatgagtgggggtaaaaaccccactgtgatgtcttggaaaaccacttcctggatgaggagaagctcatcaagaaaatggcaaccacttgactaacctccataggttggctgggcgacagccaatgcagactgatgtgccccagccatctctggcatagggtggttcactctcatgcacgtctagaaggcctcgccttccaaggggctccccctcctctgctctgctctgcaacagccagcctcaggacctccacctgaacctctcaagtcactaggcaactttgtgatcaccctggagcccctccaaagcctcgggccaagtaaaaataaagctttttgaaatagaaaaacaacaacaaaaagaatcattaagcatggagagggactgggaagaaaagagggaggagaaactgaagttaggatgtaaaatagatagatgatggatagatggatggatagagataaatagatagatagatagatagatagatggatagatattttaaaagaatcattaagcacacctggaatgtatgtacactaaaaaagatggtggtgatggcccagtgaggaagggcacttgcagtgcaatcctgacaacctgggtttgatccttgggacccatgtaaaggtagaaagacagaactatctccacaaggttttcctctgatctcaacacacacgcaatggtacatgtcagtcacacacacgtcacataccacacagtaataactaaaattaaaagaaatacttgatcattaagtgttgaatggttactgactttattaattaataaagttaattgttactgcctgtgactgacatcaggaaggcaaaaagcattcactgagagcaggacttttgttggtgtcccaagaccccaaacaacttctggcgttcagtgacaattcttataaatatgtattgaatgggtaaatggaaggatggcaaaatcaagtacataaatgccaaaagcctttgagatcaatctctggaatgtgaccaacctgcagcctgtggaccacatgaggccataaccaggtataaatgtagcccaacataaaatcctgaacttaatgtttttgaaggtattttgtttgtttgtgtaactcagttgtatgattctcaagcataaatttcatggatgacaatgtcataatgacatgtcaaacagttgaacatgcttggatcatgggaatagctgtgaaagcttgaagctgagagggcgaacagaacgactgactaaaagcaataatataagaactgacacgaatgttcagcagtttgtttgtggtggagtcttactatgtagcccaagctgacctggaacccatactgctcctgcactaatatcccaagcactgggattataggactgtgctatcaagctctactgaaggttgtcatcattgccttcctcctcctcctcctcctcctcctcctcctcctcctcctcctcttctcctttcttcttcttcttcttcttcttcttcttcttcttcttcttcttcttcttcttcttcttcttcttcttcttcttcttcttcttctagatttatttatcttgaagggtggtggtgaaaatccagcacttggaaggcagaggcaggctgatctctgagtttgaggccagcctggcctacagaaggagttccagggcagtcaaggctacacagagaaaccctgtcttggaaaaaaaaaaccaaaatgaaaaaccaaaaaaaaaaaaaaacccgaagatttacttattttatgtgtatgtgtgtgcctgcttgtctgtatgtacatgctgaggctagaggcactggatccccctatagttggagttacaagctattgtgagctatctaatatgggatactgggaactgaactttgatcctttgaaagagctgcaactgagtgatctcttcattaccacaactttcttgtaaagtgaaatctaaaattcctgaattaactgagtttagctaatttttcttttttctttttttcaatacagggtttctctgtgtaacaccaatatcctggaacttgctctgtagaccaggctaatctcaaactcacagagatcctcctgcctctgtctcccaagtgctgagattaaaggcattagccaccactgccttgcagtttaatttatctttaatctataactttcctttattttttaaggttctagcacttagagcttatgataatttcacactgaaggcaggtgtcttcccagcctacaggatacctccctactatgatttcaaggctgagatctcagtcttgtctattgtgcatgttgacagggatcaagctccttcccgacaaccccttaacatcagctgtatatgatccctgcaatcttgtagaatgccaaattgtggccatatatcttaaagttttaattaaagtatgtattgcatcttgagtgtattgtccaggcatctcccactcttactccctcattcttccccacttttgttccttttcttccctggacagtttcactactatttcaagtcatttgtgatcatgtgatcatgattgtattcatctacataacatctaggaatgacaatgagggaacaatggcttaatttgctgaatatgaccatctctaattgtattcgttttcctgcaaacaacataattttatttttctttatggctaaaaagattccatatataaggcacattttctttatccactggacacttaggttgttccaatacttagctattgtgaataatgctgaagtaaacactgatatgcttaagggagcaggcaaaagaattctgacctgagaagggaacctgcaaaggcatcttggcttgagtacggccattttgacttcagactccattttacctgcagggttaaataaagttcaggttcccaagccctagtggagttgagaactttccaatggctgaccaacccactccctaaactatagaaatagtctttagttctctagaaacattatggctcttcctaacaacagaaggaacattagattctgactggttggactgaaaagcttgtgttgtatgtcggttaacagttatggaacacacaagtacctgatctttgatttctgattagtgaaaatagtaactgttactttgtaacatgaaaaataaaagacccagagaaagatattggggttcaagctgaagatcaggaaagcaaagcagctggccactgctctcaccttcgctcaggctgaaagagctgatccatgcagcagcccttcatcaaatcttaaattgctgcctctcctcagtgtggatggagaaccaatgcctcatactgcttgctcctgtcttatgtaattctctagttctgggattaaaggtgtgagctcccttacacttttagactaattcaatctcatatatccctgaatattcatggacatgcttctcttactcctagttttattgaaaatgatttgaggatttcttttcccatttagtataagctttgctatgaaatgaccatataatttctactaaactcaaagaagagtgcaaatgtctaacataacctgtgaacaattaaaatttcttttagaaattaatacactagctatacaatattgaagtaaaaaataaagccaaaactaagttgcaatcaactaagacattccttaattctacatgagatataattctacttgagaagcataaaggttcaaagaagaaaaaaagaacattatgcagtaaaaattaattaaaatattataaattaatattagctttggctttctaatctgaagtttagttttaaaagatattttgaatttattttataaagactaagaacttatttatataccactatcatttaaaaaagaaagtttaaattggtgattatagccaggtatggtggtataagcctttaatcccagtactcttgaggcagagacaggtggatcactgggagttccaggacagtgatggataagtagttggaccctaccaaaattataacataattataattactaattttaaaggtgatggcttcagtgtgacgaggtggaagtagttttataaaacattccactaggcggtgctcttttaacttcgtggagggaaaatctgcagcagtttgaatcagtagctgatgtctaacattaaatgaaaccaagttagtggatctgactcagaatctccttaaatataaaaaggagagtagggaatctgagagtagtataaatgtggtaattaattgagatggttcttctgagcagtaacagcatattaccctcaaggcagatattctgggtctatgtatgtgttccttaagaaagacttttataacatatcaacaatggggagttctagacattagtagattttacttaattagactaaatcattccagaaaaacacactaaatgtattcatgagtttcaactatatcaacagcccttttttataattatgaatacatcctctatgtctgacattgcacatgaattacataaaagacaaaagctacctctacacgatatagattgctttattcttaaattatcacaaagcaaggaacaagagcaaggaaaggaaattgagtttgttgtcaatattcaaaaggatattgaatcaacagaaagttcatttctgggaaacctctcatctggataaattaaaattgatgcaaatgtggaggctggttagaccaatggccaaggcagtcagtatgatcatggattcagttcacagagggattctgagcaccatgctctttgccacatgacactcagaatgagttttagtacctccgatgtgtggcttaccttcttcatccttcaccttcacattcctcactttggcgtctgatttttgttttttgttttttattagaaagaaaattattttacatgtcaatcctaagtccctctccctcccctcctcccttgcccccccaactaacaccctacctaccccataccctttctgctccccaggaagggtgaggccttctatagggggtcttggtctgtcatatcctttgggctagggcctaggcccacccccttgcatctaggctcagggagtatccctccatgtgggatgggctcccaaagtccattcctatggtagcattaagtactgatccactacaagaggccccatagatttccaaggtctcctcaatgagacccacattcagggggtctggattagtcctaggctggtttcccagctatcagtctggggaccaagagttctcccttgttcagttcagctgtttctgtggttttcacaaggctgatatggacccctttgctcatcagttctcctctgcatctggatttcagttcagttcaaggtttagctgtaggtgtctgcttctacttctaccaactgctggatgatttttgattcccaagtccctggtcctttgacttgctacctatttatgtgctgacagttgttttcacctttttttttcttttcacctttttagataagtgtctatgcttataattgctagtttgtgtggacatccttgctgagattttgcaaaaatggcctaactttttcagagtgactaccatttcacattttcattgttagaagatgaatgaccccgattctccatactctcactagcattttgagattctattttaaaaaatcactaggttaaaaatggaaagatattcagatatgtgattgcatctttttcatttctgccatttatgtcaaataagtttttattcatttatctgttgtctttagtaaaatatctgctcaaatcaagtctttaggcagacttttgagagttcaaatccattttttcctatcaattttccaatgaggtttgactatgcttagaaatgtcacttggctctagttctgaagagaccatttccaagtagttttccaaagagtttatcaaacagcacatgaatcaataacaattctggcaaattactccaccagtttagaaggacaaattcatatgtaccataaaccatttcaacttcaaaagaaaaaaaagagaaaatcacattgtcaaaagctctgtcatctagagatcagcattattgatgtttggggagtatattttcagacttttgcattttctgaacaatcaaaataagctgacaactcatgatgccattttgtactttcaagttatgatcaataacctttcattttatttatcttcattaccatttcaaagccagcattgttaacctagtgtatgtgtgtatatctttactattagtagcttctctactaatagatattaagtttgcttctattagcaaaggtttaataaatcttataaggattgttttagggattttttgtaattcttttcttagcttaaatatctggaaggattgctgaaccaaaattcatacacatacatgtatataagtatatatacactaacatgcacaaacatagttgtattagtttgttgatatttacaagttgccatttataaaggttgtgtccatttatattctaccaacattgactgtaaaattctaaaacttctctccttggcttgcctttccaacaagctttaatttcttcccttttaaagatggggacacagccacatggtggttatgcacacctttaaacccaacaagtgggtgacagaagcaggtggatctctgttcagggccagcctggtctacagagtgagttccaagacaaccagagctgttacacagagaaatcctgtctaaaaagaaaaaaagaaaaaaaaaaagagatggaaacacataagtcaaagcaacttattattattttacaatattttcaaccacggtctgaggcaagttgcagaagtcagtgaggctgggtcagtaaaagtcttgtaaaatgttcagtacatttcctgagaatgtggtggcttcagtgacttcataatctgatggtctggcctcatcactaacaatgttgaccttgaacagggaatgagaacaactaatacacagatggcttttatctgtggacggagaaagcaagacttctgagaaaaatgaagaccattttctgtcatatgtccaaactacgcagatggaaggttatgacatacaagttgagcataaagcaagtcccactggcaaaagttagaagttgattgtaaattggaggctattgaagtttaggatcatttgaatactcccctcttttttgatttgaccaagcaatggaatacatcatttagattgtgatatggagaaaaaatgacttacattgacacatttccaaatttgaaacttcaaaaaaaattatcgttaatttgagcttattttttagtgcccaacagaaatttgacttaatgcacatgtctatctttttttccaaatgacattcgtatatttttatttataagtgtccccagatggattaagcaacacaatgactaaatgcaaattgtaaactctagtgattaggaaatatttatcatttgccacctaaatttagacaaaagtttcagttacaatatgcattttgtttctttctacctttttgagtagatttttctcaatgctatttagcaatttaactgctccctttgcccccgttttaaatcagtatcctccaaatttttccttgattgtagaaaatgaattcgaagtttttcaaactgctaatttgttttttgagttctgaaagttttataactttcaactttggtgggtgttaggactcacagtggaaatttttaagtactgtacattggtgtcttaaaagtacaataacaaaatgcctcataatctgtggctttggcctcttctagtctagcctcattgagtttctctgcaccagtacaaactctgaggtaaatttccaaagttggctacagaaaaaggtgaatcaggaagttccagttcagttgtaactttggaaaaattgctattatcttggtatctttaagatcaggaagttgacttagaaacttcatgaaggcccctcaaatacaaaattatgtgaaaataacaaatggtgtatcaaataatccaggtgtggtgagcattgcctttaaccccagcaggcgcaccttcttgagtttgagatcaactccgagttctaggccagccacagatacattgtgagatcctgtctcataacaagcaaacaacatgccccaaatagccttggagtttgtgactgtcgtcctagccaagcatactccatcaagtggagttcagctatactgtcttgtaaaaggattatctcagcaggtagaggggtgtttccagctgctcccacctgctgtgatcctgctcatggcctcctggagggactagaataaatactgatggagaagatgagaggagtggggctccatccatgaagccacagcagagaagccttcatccctggtgggcaaatgctttccaggggtggccttttggcagaggagcacacacaaccctttaagacctcacctatgctctgtaaggaggcccaataaactcgttggctctccaaagtcaactatggtggaatcatgcctccatttgtccttggggaccctaggaaaagtggtacagtggtttatatttcccctgggatgaaatttaagcaataggctcaagagatgactcagcggtaaacatcgcttgatattcttcagaggacccaagttccagcaccagcccggttctttgctgcagctttgggcaataaaacatgatccaccaaactcaacaaacccacatggagtttactgggaaagggagcgaaaggagggggtaggtattaaccgattgggagcagaaatggaaagagtgagaacaggcagaaagcacttgtttataaagggaatgggagcagtttagaatgagtctcagcagtttgagctgttgaaagctgctgttggcccagctctgcacggctccagttcaacatggtttctgcatgcagagcccttaagtagccacctaacgcatgcacaacacagccatgctacttttgacagcttttgagctgtcagtgaggagtgttcagttcacctgtcaaagatggatccctgggtgagggaagttaacctggagaagagcaatcccatggtggggagagagccggaggattagagaggccctgtgaacaggaaaggttctctaagaaggcccaggcccaggagagggcttgtgctgagtgacaggcaggtgctgaggagaaaccactggggcaggaggacaggagtcaggagcaggaacagggccaggttgcccagaacccaggagagggaaaagccacgatatcaacagcaatcaacgtggaggcacacaaccaaccacctgtaactccaatactagtgagttatttctgatggcaccaggcatgcatgtggcacacagagagacatacacttatatacataaataaaattcaaaattgtgtgaaataaaaatctatacttttagaatctcgactaaaaaattcatgaaaacaaaaggggcctatctgggatgaggaaggggatcagtagaatggaaaaaaaaagggtgatgggcaatgaatatgacaaaaatatattatatgcatatactaagatgttataatgaaacccatttttgcataatatatgctaatgcattatttaaaagctaaaaaatattacactatttttgttaggcatttttcttacaatcttaagcctaaaattttgaaaaccctggtgactatgcacaaaaatgtagtcaggatttgccatgcagaagaaaaagttcagagtatttctgcctctgaaatccttagaggattaattctctaagccgcacatctgtcttgtgagccttttgtctataagcccaagagtggagcggagaaggctctacttattttacattggccactcagtgaaggctcaaaggtgtctagtctctcccatactttctggcaggttctcttttgtctccggactggctctcaaaggtgctactctttgaaatgatcggctgcttccacataaagggctgtaccaacagcagttgcatgttagggtcttggaatttctcttccaactttaccctctttcacctggctctagcacagattcgcagctggggtaggaagtgagtgaaggcactcgaagggccatttagcatccttgtcagaagctgggggaactgcaggaacagcctgaggcgccccagcaccaaggctggccgaacctcacaaccgataatgatgggggaaactgcctcaggaaactccccgcatccgcacacccagccgcacaccaccgtggtcttctctggcggaaagggcgttcccgtcggttagcaccacgccccgccaccggccgcgagcccgaggcaggtgctccggaggtcattgcggggcgggatctcgaaaatctcgcagctcttgactggtgtcccgttgctacgcgacatgtagaaggcggggccggcgggagaggcgcggcgttcggccctcggggccggcggctacgcagccgtcgccccgcccttcctcctccctccctccctctccgggccggccgcgcctcctgttccgcgtcggccaccccctcacgcacagtttgagctgcgcacgcgccgtgcgagcggccaccttccctgtgaggggctcgcggtgaggctgagtggcccggcagcgctggcgtcgcagctggagccggccgggagccggttagccgagctgtctcgagggaggagcagcgtgggtactgccgcggtgccgtccgcggctgaggaaaatggtcttcgagtcgttggtcgtcgacgtgttgaaccggttgctgggggactatgtggtgaacctggacaagtctcagctctctctgggcatttggaaaggtaacggggtcgccgcagtcccagtgtcgcgggagatggcggcgtggcttctcgtggcttcggtccgtgaccggcccggcgccaccacctgcagctgcccgcctcgcccgcagctgcccgcctcgcccttcaagttatgtaaagcggggcggcggttttcgggcgggcagcgcggcttcagcctcccgtcccggtgtggccagacgctggtgacctctggcctctgccgggcgaggaggccatccctgtcagtttccccacccggggctgtaacgaaggctccgccgagcccgcggcgtgtcacacgccgccccacacgtgaaaggccaggcgctgtccgcgaagactcccttcgtcccttcccgactgctcttggccgtgttttctaggcgagttccggccactgaacttggacttgggggttgcttagccggggtaggctgataaggagggggacgggaaaaaaaaaaaaaaaaaggaaatcacctttcagagtaaaacaacacagagttagttgcttctgtgttcaggtcgcagcttaaccaggtgagaatgtgggtgtttgtgggcccgagtaaaagactgaattaaaaaaaaaaaaaggaaaagaagaaaaagaaaatgcaggaaaacagacggtcaaaatctaaatgggagttcgatatctcggtcaacttgaagaagacatgagctttctctcacctctggaactaaggtaaagcactttactgcagtgctttgcctgatctagtttcttatttttagtgcctccttctgtattatgctcttgtttatgtagctactagtaatttttgaaatgagtgttccaggttaaaattagggctaattatttgtgtaaatggtgtgcgcattctcggatatgcaagtacttccagctttctagaaatactcgtttatcttgagtgttctcatttttgaaataatgtaagcaggaattttagttttattaaacaaacacaccctcttgtagttttagttaccttctaccatgataaagtgggcgaacattgatccataagtgctagcacagcctttttgagaccagccgcttgcagattgcttaatctgtgctgcttctccggtgcgaagggagaataacaaaactggcctctatacctcagggaaaaaagcctttaaaatactttaacgggggactggaggcttggttccgtgtttaagaccagtggctcgttttccagatgacttgggttcaattcctagtgacatctcacaactatctgtagttccagtcccagggcattcgccttcctcttctggctggggtggggttggggcactgcatgcaagcatgtggtgcacagatatacacacaggtaaaacacccatacacataaaaataaaggaaaaaaataaaaaagaacaagaaaaaaacctgcatgaactgtggtttgatttgtagtgaaatggtgcttttatattcaaggtgcaggtttgtgtagaatacagttttatcaaatttatgtatttaaagtttacttagagtaaaattcacccttgtttatagttgttttaaaaataaatgttaagcatatatccaccatcccagtaatgatacaaaaaggttctacaagcctgcaacatttcctcttttatttctttgaaattgatctctggtccagtggcaactgctgatatccccatctctattttgcttgttctagagtgtcataaatggaatcctttggctatgtagctcttcctttttgagataagattttactgtgtatccctgcctggcctggaactcacagagatcctttttgaggcctgtgcccccccacatttggcttcggtgtagcctgtttttgtttttcccagacagggtttctctgtgtagctttggagcctgccctggaactagctcttgtagatcagattggtctcgaactctgccctctgagtgctgggattaaaggtgtgtgccaccaccgcctgatttgggtagccttctgagctaggcttcttaacagaatgcagagaagtcatccatgtactgcttacatcaaccttgtcctgccatccgtttacttctgagtggtgtttcactccatggctgtgttacaaacatagggttgccatttttgaagtatttcctttttggcagttaaaaggaaagttgtgttaggttttagtgtgaacataaattagttttttggactaaatagctaacagtgaggttgtgattggtaaataaatatgtaactttatgagaagggacatgttatgatttggttatagtctgattgtatctcctgaaagctctgtgttggaagcttagcccatagtcaggtgataataagaagtggtagggtcttttagaagtaggtctaatggggcggttgttatagtgaccccttactgacttttagcttccttttgtgagcttaatctaccacagtgggtgggtcaaatatattgctttttctgtaagaaccagtctcaagtattttattatggtaacctccccctaagagtccaccccctcaaactcaactaatacaccctgacactggtttctgaaatggttatattattttgcacttttatcagttttgtatcaggatttagttgtacattattctcatgaacatttgatattttcattttgataaaggttttttttttgggggggaggggggtatgtgcatgtggtatgcatgtatatatgggtgtttgcatgtgtgaccacttggtccctagttggtggactgtttgggaaggattaggaggtatggtcttgtcactagagcctgactttgaggtttgaaaagatccccagcacctctgcctgatggttgtggataaagatgtgagctcttagatgttcccttgttctcccaccatggactcttaacacataaaactaaccagctcaccatcatcttaaatttttttcttcacaatctaatttccattatcaaaattttcaataatttttttaaagcttaggtttaactagagttgctacttttgaaattttcaggagacatttttttaaagctttaatttcatttattaaaatataactgatgttgtgcatgcctttaattccagtactcaggaggcagaggcaggcggatctctgtgagtttgaggccagcctggtctacagagcaagttccaagacaacctccaaagcaatacaaagaaaccctgtctcaaaaaataaaataaaataaaaatataactgatttcttacatcactacatgacctagaaactccatttatatatatttaccactgggagttttgtttattatttgtttttttttgagacaaataaataaaactcccattggtaaatatgtataaatggagttaagatgatggtgagctggttagttttatgtcaatatgacataagcaagagttacctgaaaggagggaacctcaattgagaaaatgtctccatgagatctagctatataaacctgggggcggtggcacacgtctttaatcctagcactcagatctttttgagttctaaggccagcctggtctacagaacaggttccaggacagccagggctacacagagaaaccctgtttttttttttggggggggggtggaatccagctgtatagcatttttaaaattagttattgatgacagaaggtcccagaaggttgctgctgatgggctggtggtcctgggtactatataaagcaggctgagcaagccatgaggagcaaggtagtgagcagcacccctccttggcctctgcatcagctcctgccttcaggttcctcgccttgtgtgagttcctggcctgactttctttgatgatgaacagtgatttggaagtgtaaaccaaaacaaaccaaaaccaaacaaaaaacctttcctcctcagattgcttttgaatacagtgttttatcacagtaatagaaaccctatgacagataggcttaatattttatgttctaatgtcagaagggcccattaatggctataactatggtttctgtgtaatccagctaattttattatcatgatgctactaattagttttgaggcagcagtaaatattgctttgatatttgtttctgaaatggttccttgaaggccagaacctatcgtctcacagaaacattgtaatacaagaaataagaagcgtccaaacaattattacagagtaggaaaggagtgccttaatactggatcaactacagtaagtagactggactgtcttagaaccatctatttgtataaggggaaaaaggaattgaacttcattgctacattgattcttggcaaatttttatattgctgtagtttttatatgctcatttacatttcttcacctttcccatgtatcatttagttaggaattattttatttcttagacttgtgctagagtctttggaaatctagcattttgcttgtttctgtcaagatctaggctgtgttagaatcagcctagatgctccatagagtacacagttttaaatcccccctcagcaattataattcatttggagtcagactttttttctttttctttatttttgaacaaataactgtagagtctgtgataagaactaactgcatttagctgggcgttggtggtgcacacctttaattccagcactcgggaggcagaggcaggcagactctgtgagttcgaggccagcctggtctccagagcgagtgccaggataggctccaaagctacccagagaaaccctgtctcgaaaaaacaaaaacaaacaaacaaacaaaaaactacctgcatttaaaaatttgatttaattaattttttatttaattttgtgtatgagtgttttgcctgcatgtatgtatgtgtactatgggcatgcctgacgcccagagaaggcagaagaggatgacagatctcctggaactggagttacagacagttgtgagcccccatgtggttctgggaattcctggatcctgtgcaagatcaacaactggtcctaacctctgagctaggtctctagtcccccagctgcctgcattttaaaaggacactgcagtaagggtggcttctgttttagaatgatcatttatagtatataaggaaccaacaaataattcttgagatacagggaaagcttccaattctaattccttaaaatttattatttcatgtatgttctaagatgttttcatagaattttaaattataacttaataaatattaactaattgtataaaagaatgggatttatggtgacatttctatacactcatacctctctttttctctctctcataaccacttctcttgtatatcctcccttctcctttgctaatagtcccgctactattctcaggccttgtttttgtgtttttcagtttctacctatgagagaagagcatatgtcatacttgcctctttgggtcttactctgccttatgaagtcctccagttccatccattttcttgcaagtaacatgattgcacaagtctattttcatctatatttatatctatatcaattttcttataacttatctgttgatggatatgtaggctgattcatacttggacttttgtgagtagtgtagcaatgaacatgattatttatttaggcccttctcatattctggcctcttagtttgaatgtatttgttgtatagctggttcatataataatgctatatttagtgtttttgagaaagtaacatattgctttccttagaggctatcctaatagacattctcaccaacattacttttgtttgttttgagactgagtttcatatatagccagggcagcaatttctatttgtttgtttgtttgcttgtataacagccattctggttgaatctcagtataatttttatttgtattccacaatagctaaagcaattgaacactttttattgtattatttgccatctgttctgcttaaaagaagtgtgtgttcgaatcatttgcccagttttggactggattactttttgatttgtgtgtgtatgtgtgggtgtatgcatgtgtattgtgcagatgggtgtacagctgtccttgcactcctgtgcctttgcttctagaggccacaggtaaaccttttgtgtgatttagcctatgtccacctttgtttttttgaaactctttgggccatctcacacaagatggctccctgttgttaagtgctgtgagaatgtgcagagaacttctccagacccattttgctgtgtagatccaaattactttgtctgttcaggctgtattaatgttaggtgccagatgccatgctgagattctcctcctttttcttcccccacattctgtctcttactttatcttgcactatccaaaatcttaagtttttcctctttttgtttactattgaacgtcagcattctcccacatccacccattatgataaaccactgtttttcagttgttttgattgtatcttgtgaagtaatatggtgaaaggagcaagtattggttagcgatctctaatcttttatttccacattgactccactttaaactcaatcaagaaattatagcactccactttaaactcaatcaagaaattatagcacgaataataaaaacctagagactgatgttagggttcaagccaaagatcagaaaaataaagcagccaaccactagaaagttcttttcatctaccaagcctggggtgatcctctcctcagtgtgactgaagactgaatacagtgtactcccgtctccacctgccttatattcttctctagtgctaggactaaagggggcagtgcccagcttctatggctaactagtgtggctgctgagattaaagatgtgtgccagcactgcctggcctctatgggctggggctagctttgtcctttgatcttcaggcaagctttatttgttagatcataaacaaaatatcaccacaagagatagaacatgattgtcaacaggaaaacaatctcttctgaccctttcccccaaattgctactaatcccctgaggcagttactatttagcttcttaaaaacaagtcatacacacatctattttattttattgagacggggttttactatgtagcctaagccagttccaaatgagctttatagcttggccaaccttgaattcataaccacactcctgcctcagcctcctaacgggatgtatataggtgtgcctcatcaaatctaacttcttttgtacttgctttaaattttttctctttgaagaatattcgttggattttgacagactgttgataagattacaggatttcttctttggcttgttgatattattatatagattattttccataggtaggacattattttaaggtgtgttatttttgtttatgctgcatttatttaactctgaagctgtgttactgctaaagctttctaaagtttatctttacttacattttttggtaagttgtatttccctgtggttgaaaatattcaacaattcctttcatgacttcttcaacctagactgattttagtttagattgtgatttcagtataatttctattttttttcagacttgttcagatacagatctgttttatagactggagtaaatcttatcttgtcaatgttgcatatgtgttccagaagaatctgtagttctgctattggatgaaataaatgttccataaatgtcagttagatccagggttggaatgctgttcaattgtgtctgtattttgccccctaaatatgtgtataactcatactagttatctggctctctgccggtaatactggatttgcctttctctaattgtacttctgtcagttttgattttgactcatgtattttgatagtattgtcaaacaatgcaaattaagaaatgtgctacataattttccttgggagaagaaaataaatgcttattcactccagatatggcaccagtgacagtgacagactaaagaaacgaaacaagtccacccaagtctgatgttcatgtaaccacagttcttacttcaaagggaaatatgagagattattctgagtcaaatatgagtgaccatggccttcagaacaaagacttctggttgcctcaatgtgttcagtgtgaatgctgtcatgtgaatttttatggttccagaacaaaagaaagtcataaatgaaggcgtttgcagttgagaggtaagggtgtcagtgtcagatagataggtaacagcagactgtgaacagttctgctacagattttattttactttagttttaagcagagcaaaggtagatatattaagggaaagggaggaaaactcctgtgagtgggaggggttctagaggataaacaccttctgctagagattctagattttatctgatgacattctcagttttggggttagtagaagaaactagtggtccataaactcactggaaaggttgtaactggtgttgaaaggatcttaggtcaggcagaggttagcaattaatgacatttaagataatttacctactgatctgcaaattctagctgtctattcagcttcccttgcaaaatcttgaattcaattcaagattttgagtttgtgacctttttgaggcacaaattcatgtgtacagttctgctgttgcccacacattgtctctgggctcttgtgcatgtgaaggctgcctccagcaattggaaaacccattcctaggatttggtaaaaattacattgaggaggcaggaaagaagtcttcaggatagagaaaggcttgtaaccttaatggaacaggcccctggtgtcatagtaacattactaggaattatgacctgtgtctaacttttttttttttttaattctttaagtctgacatagcatttatgtggacatataggagtattacacctaaagttaatctttagtatgacctaaagaaaaacaggcagttcaggcaaccaagaagtcatacaccttttattaggctgcatgtttttttttttttcctgtgtgtattgctatttatatactatgaaatacttgctgctttaaagtatttgaaataatttgttattgttttaattttgtcattctattggacaatttcatttcataaccaacctcatgtggttttaacttaggaaagattttttttaaagattttatttagttattatgtatataacattctgcttccatgtatatctgaacaccagaagagggcaccagatctcataagggatggttgtgagccaccatatggttgctgggaattgaactcaggccctctggaagagcagtcagtgctcttaacctctgagccatctctccagtccccagggaatatttttattgttcaaattattatggttgctatttgtgactaacaatttcatctcttatattattttggtattttaccagattctagtttggggaaataattgtataactaaattgtagaagaaatcagatactagtacagtgtcatttcaggtttttttcccccaataaaattgacctttctccatacaccaaatattatagcaacaggagtagaaacaaaaggctagacttttgggaaatcaggattacacaaaatttttcagcataatgaaatcatagttcttattttactgatagaaagggaaatgggactctgttagaaattattttgtataatatccatgtacttctcattgtttatgaccatttagtattttgtcacccttgctaattgtaccatgcccacaagacttgtgaagttggggcacatgggctcataaggtatagtctcttgggttaaaagttccttagttttgaaaaacattttctctatttgttcaatttttaaacagtaatacttttaaaagtgtatctttgttatgactaatagcaaatttagcttgttaagaaatttttagatcagtattaatgcatccagagaagtttgtttgggctctggtgtctgactcgttttgatccatgaatgctattgccattggagactgtttttggataaaaaggaccaacccaaaatcctaataagagttaatgtagttagtatgagatctggataggatacatgcttcccagagcccttaatttattgtcttgtaacattttaatagtgttttgccaagttcgtgagaccccaaaaaagaccaccaaggagccaactcactgatgcaaatgcataaggtttaatgttaagttacaagactcggcagggaccctgtccagcaaactggcacagcagctgcaggaaaagggtgcctggcctcaattgcaaggggtttttaaaggaaaaagccgaaagcagggtggtacatgccttggctgttcaggattggataagagtaggataagacctttggattcattgatgtggggactagtggaattcatattttggcagtacaaccagttatcttacatatttttattggttgtcattgggagggaacattctatggtttctgggctgcaccatgaccttttcacttttcaggaaagtggtctgggattttttaaatttcttggaacagggtggaactgggtaacttcagaggtcaaggtggagttactctactctgaaaaagttgctgaggcttatttaatttttaaccctttcaaatagtttaagcaatgtcataatgttatgtgcagttaatattcttccctttttcttaataggaagaaattatattgtttttggctgtagtagtttggatttagaggtaacttctcccctcaatataattccttttgaaagatttaaaatcttaaagtcagtctctgtcaatctgataactggatttaaaactcaaattacactaaatatgacaatctttttgtggtagtattaaataattgggatatctttaaatagaaagattgcattcaagcaaagtaggactggttaagacatttgtcataacaaaaacatgattaatgagattagtaatagtataaagcttttttttttttttttttggtttttctctgtgtagttttggagcctatcctggcacttactctggagaccaggctggcctcgaactcacagagatccacctgcctctgcctcccgagtgctggaattaaaggtgtgtgccaccactgcccagcagcttacatgcacttttaattccagcacttggaaggcagaagcaggtggatcttggtgagttcaagaccaaggccagcctggtctacagagccagagccagatctctgtgtggttacacagagaaacctcttgacaaaaaaagtatatgtagcaatctttctctctcctcccccccttctctctgtgttctctcggcatacttgtttatgtgagtgtacctgaaaggtggaagttgatgctttattgattgttcctgggccaggatctctgattgagcttgcagattgctgattctggctagtataactaatcagttagctctgtagacccttttgtctcctaagtgctgcgattccaggtttagcctgcctagctttttcgttggttctagggaaccaaactacagtcctcatacttgtacagaaagcactttccccattgagctatctccccagtccccttgtctagtttcagagtatacctagtagttattttataaaaaaataaacatattttacaagtggggtagatcttagatttagaaggattaataagaagagcttcagttaaggaacctgaaatctttattttaacaattacagacatttttaagtgccatttgttcataaccaccagtgtagaagattgaagactgtaggtactatgaaaattttgttcaataggctagattttacaaacattttaaacatttgtcaattaaaattaattccatgattatgtaagttagtaggcatgccccccttttatctgacagtttttctcccatgtcaaggcaaagaaaacacaaggaaagatgtcaacccaataggagaggatatagatttagtattaaaattcatttgtatttgttggagtatgatggggaatgttcttctgtctatatgtttctcttattggttgatgaataaagcactgtgaacaatgaggcaggataataggtgggaccaggagacaaagaggattctgtgaaatgtaggcagagtcagtcatgatgtaggaggtgagaggagtaacagctctggactagtaggtatacatagattagtaattatgggttaataattaagacagagatagccaataagaagctctagttaccagtcaacagtattcataactattatagtgtcatgtattcatttggggactgatgactctgggaccaggctggtgagaagaaaactcaagttacaggaataggtgtttgcagccattcttactccttgcttgttgtctttggttgttggagtctatatactcatgacagaagggagattgcatcattagaatgaaactcatgagatttttgtgaaattgagttaatgaaaatataaccattaaagtgaagaatggaattcatgtccatggaacaatcacaggtgcagaggtcagcatgaacatagaacttaaaaatatgaaaacagggcaggagagatggctcagccttagacaagatttggtctcaagtattatgttctggttctacaaggttgtcctaagaagtccttgtggcttgaaatgacaatcgggtcgtggaatggttacttctgcctgaagatacagacttgtcctgatgaacaattccccttataatagggaggctttgctgttcctgaaatacatgatggcagcaggtttaggatcatgattttttttctgttcctgttgcgttgaaaggagatgaaatagactggaataacaccctccttaagagatgcccatgcggagtgaagtgggaattgacacagaactagagctgtggagttaaaccatttttacttctccctctgttcagggagtgatcccaccaacatggaatgcaggtggatctcctcacagtagtccagttctgtcaagttgataaggttaaactatcacagctgcttaatttggttaggctaaaaactcttgttggggttctgcatcttaaagtagaaacttttatatattgtaatcttaagaatgtcaaataatccaaagaaactagcagctaaactaagcaggcacaatgacatacaattatatttagagtgtactcttagaaactaaattttgaagacaggaagcctagcctaatcattaacaaagcttaagggggtgaaggtaggtatgcagaggtagggtagtatcttttcctgctttaagaactaaataacagagatggagacatgcttataaatagaattttttgatgaaagtcagaaaatcctgtgtttttttgttttttgtttttgttttttgtttttgtttttgtttttgtttttgttagtgagatggtagaaaacttacttagttaaacacagaggtcctgacacaactcagaaaccttatgaagtctttaactcaagtttttgtccagggagtacagatagtacaggaccacttccctataggttttatcattaaagcccttcatttttccttggacaaagccttttgtttcactttggaattactagaaaatagaagaacaggataaagaaagtagagaaggcgtggttggtgttgggcagacacaagtcaatagggattgagaacagattctacaggattcatctttagttctgacaaagtcttaaacacttttatttcctgttcttcagaatctttttaatagaatatccaaagtaaactagtaatgttattatttcttcctagttgttcttaaattccagtttgtagtgattgctcatttagaatctttagttctgttgcataagattttagtttagcttgaaaagaaacaagccaaccaaaaacaaaacaaaaattaagtttgggcatatcagacattcctcatgttttctaaataacttgcaggttaaattactataattataaaatataatacctgctaaagtactagacggtgtgtgctcgtttttgttgccccccacccacccatccagcactttttcctcctccaaatttctactttcaattttggtgtctatttatttatttattttcttactttttcttctcagaaactgtaatctatgatagctggagaggtttgtgttttgggtaagatttatgtgccacttagctctgaagaagttttctttcattccatatatagtttatgctgcacatttatgggaatatacctggctgaggcagcaaagtttcatccaaactatgagtggagtctgttgtcttgggcttcctgtgagttaactgtacatcctttggagatccctgacaccgatgaaatgatccatgggagatagttattgtctctacagttaacccaattaagagtataagaatcctttaataatggccagaccaagaatagctcacagcttcaaaatgtctcttggttgcaaagctcagagttacagtattttaaaagacaaacccacaagtatatcagtacttgagggggcttacatagtgagagtagtagtccagtagcatctgttttctttcagagctcagtagtattcttcagacactacactgcaattaattttgatttaccattcctcctagttattttaactctatgttttatcttgcacaaacattattttgattaaacacctggaccatggtgagggtcatggacattcccccaaatgttgccaaggtggatgtgacattgcagggtggaaggctgaggggcatctaggaagacacaaaatagagttaagacaaggtagtgttacatgagtagttttaccaccaccatcttgtgcaaagggaataagtaccttttgaagattcagtatcctcatagaatgggtgagagtgcaatgacacacaggaagaaaacagacttacatgttgtagggaagagagaaaataaagatctaacagtaacagtcaaatgctagggaaggagaggtaatcctttatccaaatactctgagaggatgtccagccaccagttcagcagatcagtagaccatcaaataaccaaaggggaggtttgggtctctgaaagaactcaccaacatacacttaagcaagcagattgaatgattgggcacaaaaggcttgcacaggtacctgttgccaatccaggtgacttgtctggtgaaaacagattgtccttccttgggcccttattttcaggcctcaaaactgttagtttataaaatacagctcttaattgaaagagaaataagtttgttcttagccaagtataaatgaccatgtcctaggaacacagattttagttgcctagaataacatattccagcagagacaattacatgtgcttttatcacacaacaaaagttatagataagacattttatagatacactagtggggacatggtgtgtgtgagctcagaggacagaggagggccttaagcatcctttcttattgctttctgccattttctcttgaatttcatggagtctggagtgtttttcatctaggttggtggtaggcaaaagattctcctgtcagacctttttagactgtcagacctttttagactgtacagaggaatgaacatgggctagcaaaagcaaaatctaatttatgttatgacaattatttttctgttgtcatatttaaaacaaagtatatttaatttaaaattaaatacagttgaatacattgttttctttcttttttaaaggagctgtggccctgaagaatcttcaaattaaagaaaatgcattggtaggtcttgcctatgaaaatttatattagtgtatttaattaatacattcatctctaatttaatatgccaccttaaattatctatgagaaaaaatttgaaagttattttcataaaatgtgaatttggcaaagtagatctaaattcttaaagatagaaactgacagtgtagttttttcttatttaaaatatttgtattttatttatttctatatggtagtatatgtagtgtttaacttcttgtctaattttttagcatcattttagtatattaaattccatgacatgaattatattcacaattttttgcaactcttactgcatctatttccacaactatttcatattgccaagagaaacactgtccatattcaacaatagctattggcctcgggaatttttcttcactgtacactgacactgtattcaccaaataattttctaagcctgtttttccatccccataaattacttcatcaaatggtaccatgtcgtatttgcacatttcttctatattgtttcacttggtgtaatgttttcttgggtcatctatgtcatagcatgtaccatggtgtcatttctttttatgactgattattctctatgtttaccacatttttgagttttcattcagcctttttttcccctctggtttttgatgagcatttaggttgtttcaacctttgggctctttcaaatagagctgcgatagatactgatgttcacatatctatttaagaacctgctttcaggtgttgagtgtatatttaagactaaatttctggtttttctaatacatgtagcctttttcagagtgagccaaggtgttttctttcttttcttttcttttctttttttctacagctgtgaaatcactttgtatccctccaacaagttctaatgttttgacatctcccagatcttcaaaaaattactattttctgttttacatattaactgccattttaatagataagaagtagtatctcaatgtctttcttggtcagcacttatttcccaaataactattatttcctgaatagctagctagtgatgttaaacatcttctcatgtacttgtttctgtatccagatgtgctgagtttaaagacattaaaggcatgaatcatcatacccagcttgcttttattcttcaaaatagaagtataaaatttatttaaaacaacccacaaaattttgcataatcaacaatgatacaacttgcaaatacttaagcaaattcatgacaaagatttaaaatatattttcaattacagtattgatttagccttattcagttagaacagtttttttttaaaaaagaaattttatgttctaaacaaataagactcacaaagtataatagacaatttccacaactatttttgcatttattttttcaattctagtacatttcaacaaagcatggtattttagtgcattttgctagttacatgtgaaatcatttacaatgactatgcatcaaaatttagcttaattggtctttaaagtaacatggagttgcaactcatgaatatttaagtactaatagtgagtgttctgttgtatgcaaagaattcaatattgatcatgtattaaaaataaatacacaaatcatctatgattatctctgcattttatgtggtgaaatgctttctttccctaattgtttccttcatctgtgagtgtcccagtaagggttactattgctgtgttgaaacaccatgacccaaagcaactttggtgaggaaagggtttatttggcttacacttccatatctctgttcatctttgaaggaagtcacggcaggaacctggaggcaggagctgatgcaggggccatggaagaatgatgcttactgaattggtcccatggcttgctcagcctactttttttgttttgttttgtttttttttttttgttttttcaaaacaggatttctctgtgtaaaagccctagctgttctggaactagctctgtagaccaggctgtcctcaaactctcagagatccacctgcctctgcctcataagtgctgggattaaaggcctgtgccaccactgcctggccactcagcatactttcttatagcatccaggaccaccagctaaggaatggcactaatgacaataggctgggccctcccccattaatcactaatttaaaaaaatgctctacaggattgcctatatctccatcttttggaggtatttattctacttgggttgccttctctcagatgactctagcttgtgtcaaattgatataacacgagccagcataactgacctcttgtcaacttgatgtaaaaccacgtccctgttaacccacaacctttctttttttgttcacccccccagattacacattagtaatgacatcacaatataaaacctaaatgagtgagaatgagtcaaatagaaattcatgttgatctctagtggaatcatactactttctccttagggaacattttatggttttctagtaactcaaatatatcatcatccactcacacatcacaatgcaaaagttgcccatagtttttgctacaaaatcgtttctggaaaaatcatttatcttaaaggacttatcacaatgttaactctataaaggcttaaaaatgactatacattacacaatataaataatttattctttcttacattgtaaagtcaaatagacattttatcatagcacaaataggtattggtgaagataccaacatcatccagaatggcttatcatttgaatattctgcattatttgaccagttccccattttcttgtgacaaagaatgtattcactaatagttaaaatctactacctctacgtagaaaaggtgataaaataacctatacagagaggctactagaaattacaaatatatctcagtattcttatatttttgattgtgaggctagcctttaatggctgagccatcttctccagcccatatcttagtattcttaactctataggcaaagatatatttgctccaaatattttaatgtggctacaaacaaaggcaaaaaaaatgacaaatgatctagaaaaggtacaacctattgaagataacaatattcatatttctcatggagggctaagaactaaatgttcacctagcacccatttcttcaagaaaccttcctttgaatataatataatatatatatatatatatatatatatatatatatacacacacacttaaacacaaatagatattattttgatcgcaaggaattgactgcagtcttcttataagtcctatttaaaaaccaatttgagaaaagcttattttgtctttctactttaatagtgaaggcatattctattttttgttttgtttttttctctctcactgaacatggtggttcacacctgatatcacagtgtgaacctgccttaaaaaaaaaaaagtttgggcttggtgtctcatgacttcagtcatagtactcaggaggcagagatctgaggatcttaaggagtttcaggttccagcttggatttttaaaaattaggttttgttggtctgattgaaaattttgagatctttatttattctgtatactggcccctgattaactacttgatttacagtatttttcctcttccaatgtatggctaatctgtgatcgtgtcctttgatgtatcagtgttttccattgcctatgttttgttttcatttccatgatatctatcataaagatttttttcttgtgtttttctttaaaccattggttctcaactttcctaataatacaaccctttaatacgaacacctcatgtcacgctgaccccctaaaattattttgttgctgcttcatagctgtaattttatattatgaatcataatgtaaatatgtgatatctccaatggttttaggtgacccgtgtgaaagggtgttaacccacaaagaggttgtgacccacaggctgagaaccactgctctgaaacaaagttttagattttctgtttagtttcgatttgtgttgagttttacatatggtataatacagagacccaacttcctatttttactattggctattacattccccagcaatggttattgtaaaaactgttctttctcccaaagatcaggaaaaatagttttgaaattatttggtagactgccaattttgggaaatgaagtcttaatttttataaaagctcttctgtttagtaataagtatatgcttaaccatttactttgaaaagagagtctttttgtaattaaaccactaaatttaagtgaatataggagataaaaagaatatgcaaggtaattaaaatacccataagtgtttttaggaagtaatcatctatattgttgaactttatatggattaattaatttttttttttttttacaaatttacttttctgtatagagtgaactggatgtaccattcaaagttaaggttggtcatataggtaagccatatttatcactggagtgttgtcattgttgggcatgctgtaatgtgatcttcctaatgtagcattaatttaaaatataatatttgtatgtttttgttaatgtagaacttagttgtgtaacttgaaaatattgtgggttaatgtactacttgaacagtaggtcttgaagttgagttcagaatcaaacagcatctaacagacctaaaggaactatgttagtttctgtgtttctgactagttatgtttgctattaagtgataagtacgaaatgcataacataaagggtttgggttacctggacactgtagctagggaccaaatgaaaccttaattatgctgtagaaattgttccaggttttttttttttttttggtttttccagacagggtttctctgtgtagctttggagcctatcttggagtccaggctggcctcgaactcacagagatcagtctgcctctgcctcccgagtgctgggattaaaggcgtgcgccaccaatgcccggcctaaagtatgaatttaaataaaatgtgaacgtaaagtagttcacgtattggtagaacagaaacaaactaagaatttaacatgtttaacaaagtctctttggattcttagtttgtgctgttatgcatttatttaaatgtcataaaggttgattgagagcataatagtgtcttaaatcgagtatttgtttcttcctttctgtctcttcctatagtagaatttatatagtgttgttgaagctgtgagaaacagacattctcaaagcttacataaaagtactgtgatgatggtctttataatttcgtatattatacttatagttggtattataccatattccacagaaaattttgacatttctagaatctaaattctgccttgtccctctaacgatagtttagcatgattaagaagtagaaaataccaccaggtattttccttttgacatcttaattattatatgtttctgatagtttggagtggtaattttttttaaagacttgtaaccatggtgtaagaatttttcataccgacttcatttacttctttactataacacaatctgaggaatacatagttgggtggaataatcttatattgtaagacaattttataataaatttcttgtatgttgcttttagacattgtccagaagtaacttaagttttacactgattataattgaatttcagtgtatgatgtcagtgtaacctcaattcaagagaaagttaaaactataccaagagggtagagagtttcacttgttccttttttcattgctatgacaaagcgcctgatacaagcaagtgaaggaaggaagaaagggtttatttggttccatttcagggtgcagttcattgtgatgggaaagggatggcagcaggaaaatgaggtggcttgtcaacttagtaaggaaagagaggatgctggtgccagttctctttctctgttattcaatgtgggactccagcccctgtggttgtattgctcacctttacaataggtcttccctcttctgttaaacctctttgtttcataggtgattctaaatcctgtcacattgaccgtgagaattaatcatcacaggtttgattccagcaccatcgaacaaaactatataaaaacaagtattttatgtttgtacacatatataagaagagtagatagacccattttcttttaagtttgccgccttttgtttttcctttttaaagggcaataagttaattttcagttactagaaagttcactagacaatcaaccaactaaggtgttatttgtatttttcacatagttcctgtcattttctaacattatatttgtatgttccttttattgtgtttttactatttaatatatttcctgatgtatttgttgaatgaaaaagtacccattttaaatgagttatatagaagtacagtcagttttataggactgtatgattcctttacactgttgcttgatttactgatctttcaaagatttcttttaaagcgttatagaaagtagattggtagatgtatgcttaatgaatgatattgttgtctttattatttcaatgtaggtagtcttaaacttaaaattccatggaagtacctttatactcaaccagttgaagctgttttggaagaaatctatttactcatagtgccttcttctagtaagtcattttaaagtttataatttaaattattcttagttttagatagaaaaatcttcattatatatttttacttcaagtacttttggtggagataatttagaactttaaggttcaaattgaattgctttttttgtttcaaatttcagtaaattttgtttggattattgattatttaaaggttaatttttggaatgagtatatttaaatttaaggtaattgaaattttttcatgttttctgtaggaataaaatatgatcctatcaaagaagaaaagcatctcatggaagcaaagcaacaggaactaaaaagaatagaagaagcaaaacagaaagtagttgatcaaggtaaaatatcaataaacagtgctaataaaggatgtaaatattgtagtagaatattgctttccatttccactggatgtactaagattatggttttttgtttttactttttgtatgtttttttcaagatgatgtttccttgtgtagtcttggctgttctgggactagctctgtcgaccaggctggtctcaaactccgagatcttcctgcctctgcttcccgagtgttgggattaaaggcgtgcgccaccacccctggctctgagattatgttacaagtaggaaaccatcttattaccaggaaaattacgtggtttgtgtgctttgttacttgtgcagaaattttaccttgcagaaatttaaggcaaatagtagtttcttgtgaggtaaagtcagtttttaatattagcaagtttatcaagtacatcttcttagcttcctagcctttgcctttgtgtatcccccttaatattgattatttaatcttgaatatactcagtcctttaatatgttaatatttgctttaatctgcaccccccctttggcttcatttcagcctaggtcacatggctcattattacaacccattgatcatcagtggaagtgtgtatatgggagggagtgagggagggagggaggaagggggagaagggggagaagagagagagagacagacaagacagacagacagacagacagacagacagacatggtctcactatatatctctggctagtctacaactcatgtatatttgcctgtctttgcctcttgagtgctgggattaaaggtgtgtgccaccctgcctgacaaatttttaaaaaccttacctttcttctttacttagtgagtgaatacagatgtgacttcattaggaagccttttacttacctctgtttttgtgtagtctcatcctgttccccatatacagtttatcagattttggagcctgttaggtctgttttacctgtgataaactcttacacatgtttagtaggctgaacaacaagggatagtttcttagccactggctgggaaagggtggagtcctacacatttgactgcttactatacagatattaaaccaataaattttaaatttctattttatgtgtagtaatattttgtctgcatgtatgtttgtgcaccatttgcctgcatatgtcagaagcattggatcttctgtaactacagttacagttttgagccaatgtgtgggtttgagcattgaacttggggcctctggaaaagcacagtggttttaaacaccagttgccaatccccctcttctgttaaggatactccttgattgctgtctctgttctgtgtgacttcaggtccctgaatctttcagaatcctggttttaaactcttatgattgattgacaaccctatcctgggttgtttaggatttaagtttcttcagtgtgactgaagccacctgctttttgttgcttttccccaagtcttttaccttcttctggccttgggatttgcttgttttttgtttgtttttttgtttttttcttttacattcattattttttctttaatgaggccttacagaggaaaggtaatgcatccaatataaaccatgtttaatgggaactttttatttgtacttagcttcaaaatatgaatgtttagtcatgtataaaattcactggtgacacctgacaccttattactggatgaagtttaagtgcttcaacaagatagattaaaagcttatattgcagtgctgtctatttcccctcctttataactggctctgaatcctattgcattttctcccaggcatattgactacttggttgtttactaaatgtgtcagagtctcatctccccactctgcattgtacttcttcctttgtttattattgttgtgaaagttttcaacattagggtagtagttaaatattttaggatgtgaatgaggttctcggcagcaacagtatagaatgagaaaagaagcaattctaggattgagttttaaggaaacctgtcatctaatgattgaatagaggaagaagacacacaaaagactattaaaaaggatggtcagataataagaggaaaattgaagtttatggtttcatgggtaagaggctctattaagaagcaaatagtataccaaaccctgatggaatatcagtttaaggtgaggattattactttattcttgatatctgggtcattggttaccttaacagtagttggaatcacgtgatgatgatgacaaaggagttatcttatagttttacttacagatttgaaggcaaagtctgccagaaaaagagagctgtgggagtgtttttttaagctttgagagaatggatggaagtgatatgcagttcatggatgaaattttcaagtaaattgactttaaacatttccagacctccttcagctcttcttatgttccttgtactccctctcaaattcatgatcactttattattattattattattattattattattattattattattattattgtgtgtgtgtgtgtgtgtgtgtgtgtgtgtgtgtgtgtgtgtataaatccaacctgctgaatgcaattagtgttactctgaggtacacatgttcagggctgaccccttgagattggataacctttcatgaggcttgtccctggaaaagaccaattctccctttcttaccagtcattaattgtctgtaactcctcatctaggggtagggccttctgaattttcccctgtccatgttgacacgtttaatggtgtcattgtgcaggctttgtttaggtaaccatattgttagaattttatagctgcagtatcttgacatttatagaagacactgcctcatggcagatgcccttgtcctctggcttttataatcaggttaaaaaatttaatcccaatgaatttagcatcgttgactctaatcttctgagacaagaaactagcttttaaacattgtacatttagttgcttttgtaaatcatttgttatgagagattttggaaatctcaagtgatttatttaaaacattatacattttgtttatcaaggcaatatgttactttaacatatttatattataaattagatatttatagagtatgtgtttcattcaatttaaaaaggtttatttgcaattttagaaaatcctccagaggagaaacaggacactttcacagaaaaattaattactcaaatcataaaaaaccttcaagtgaaaatttccaatatccatgttcgttatgaagatgatgtaagtattttttcctcatgtatgtattttgctctgtagtggccagcctagtaaatactgggagatggaatgacagagaactgaagaccatacgatcttttattgttacgtttttaatgagtgcttggttaaactttgcttattcaacctttgggttatgaaggcaatgtcttgggagttaatgaatttcacagatttttttttttttttaatctccaagaaagaatactggtttaggaataagtagagctaacttaacttttgctcttcagtagcgtattgttttcttaaatgtgtaattagtttctgttctaggttttggtttttctattgctgtgataaaataccccaacaaaaacatctttaagggagaaatggtttactggctataattcaggtcatagtctatcattgcagaaagtcagggtaggaatgtgaagcagagactctcatccacagccaaagtagagaaagaatgaatgtgcatgtctgttctcagcttgcttctgtcactttttacagcacaggacccaaacctagggaatgatgccacccactgagggctgggcctctgcatatcagttagcatcatcaagacttttcattcgccttacacacacctcacctccctgacatgcccataagtcagcctgatcttaacagttcctcattgagaccctctgctcaggtgattctatattctgtcaagttcacaattaaagatacctcattgagaccctctgctcaggtgattctatattctgtcaagttcacaattaaagataaccatcccatttgttttaaatgttatcgaatccttttaaaaaagcatacttctgataaattcatctactcctgtgttgtagaaaaggcacaattccagtacatgtgccatagaaaattacatcattaacctgttttggtcttggttcttggaagaaacaactcctttaaagagcctccttagcttcaaaattattttttaacagttaaaaacttaacaaaaggttggatttttacaatgaaaatatacataaatcgttgagtgtatgcatcccttttcccctttaaaataaagttatgtccataatacaagtttgttgaaataatgctgccacacctttgagaggtactcaacatctgtggatgtgagagagcttacagatactgcttaaaagatgacagaagagcctgagattgaaacaaaaccaaaaccagtatatacatgggaagcccaagtctataaaaaaaatgctcaaagtcggtaggtctttgagcccaaagtatttactgttattttatagtctaaagtgcataggggttggtatttttaaacacattgccagagaatttatgtaaaaatagaatatttttttctttctggcaaaagttggtgctggaatgcattggctatttcagttaagtttcagtccatctcaggaagagtcagggccttctggactgtgcctgtgcaggtgatgatgctgaattcctgtgtttgcttgggtttaatctagtgctgcgactgggaccttacattttgccttatttgtccttaaggagaaaagtagttatcaatactgagccacttacatataagagtcaaatgtctccctggagtaaaggattgtccaaagtttcagattaaagcaaaatagggctgcactttgcctttgatacctgactttctcagtgacacacaactcagtttcactcccattttaaacagattactgtatcagttttaatgcttttacaaatttaaaaacattctacaaataaagtattttatacaacactaatacattttttaaaattaattaattaattaattgtgtgtgcagcattctgctttcatgtatgtctgcacaccagaagagggcaccagatctcacaggtggctgtgagccaccatgtcgttgctgggacttgaaatcaggacctctgaaagagcagccagtgcttttaacctctgaaccatctctccagcccccccccatcatcaatacattattatttagcagtttgtttttagagaaaatagaacaaaacttattctgaaaatgtttttcaatatttgaaataagatacttctcaggtatttgactttttctatgaagtgacttttgttcaactgataaaccatctaagtagtttactttgtttttctttagatcacaaatcaaggcaaaccactctcatttggtatatcccttcaaaatctcagcatgcaggtactttgttcaaaaaagaaacataactttttacattgtgtagtaatgattctaagaaatataccaggaatgtgtttggttgattgtgtagaactggtctggaaagctatcagactgaatttggagtaagtacaggctcatctttgaaactgttgatttttttttttttaaagtggattcagatattttatatggttcttctgtaagttacccttttcattttactttgtttttcacttttatctttgtagctacatatagtacaattcaactgtactccagttcagtattacacctatttgcttttatgtatagttttctttaaaaaaaaacatggttctacaagtgaaaaagaaaggagggtgggagaagccagagatataaaggtggttggtgtctgttgtcagtgctgctggccaattaaaaaatgtagagaatcattgtttatttttggtaatgtgaaaatcattggcacaataacaacagtggttttatttatttaaaatactttctgtgtatttctgtgtgcctctgtgtatttatgtgcaccacatgcacatgacaggagcccacagaagtcagaagggagtgttggatcccttggacctggagtaacaggtgattatgagtcactatgttggtgttgggaactgaaccttgctcctttgtaagagtcatgcttgtttctaaccactgattcacttctgaaaccccacaaactgtggctttaatgattacctttatcagttcctggaaacttgtctgctataccagacacacagagctactcttgtgttggcatcctgatatatgtgtttttgcatttttgttatcattagtttttgcaatgccgggtctttggtgtgttaggtaagcagtctaccactgagccatatctccagtgtgaaatctgatttaaaagtcactcttggtgatcataattcatgctgaagtttgggaaccacacttgccatcaattctttacagagcagtgtaaccatttttccaaaatgaaggatctggtgaattcagcattctaagagctgaggtagtatcatgattccaagtgcctctgggactgtttggaaagaaaaattcatatgcaaataaagatttgattactgtagttcccattttttattttaaaaatttttaactgttttgatttgaaactggggccttctgcaacattccttgataagtattctttattatacacttgttcttgtcctcagtgactttgattacccttagtttaaaatccatatttttgtctctatattgtgtataaaacctttgaaatctgaccctaagtaacatatttgtttttttctgttttcatcctgtgttttattctttgaccatatcttgggcctttgtaaaaaaaaaaaaaaaaaccaaaaaaacaaatcaaaaacaaaacaagcaagcaaatgaaccaaactggaattataaccttacaatgagtatcatttattcatggtatatgaacttccatgatcataaggctgttctttctcgagtcctctcaacaagtgtactattttatctggcatacctctgagttggaattttttttttttttttgccatgttctgtatgctgtatattgctcttctaaaattacctgtttgaaattatttgtgcttgtttttcaccagtgagttccgtgaaagtaaagggtaagggttagtggtctgatagtagtattttttactaaacgatatgttttcaaaggcattttagtgagaaattggccttaaggtgtgatagataataacttgtttattgtgtatataatggtctcctttttttcctctgcagacagctgatcaaaattggattccatgtttacatgatgaaactatgaaactagttcggaaggtaaaataaattctaacccataaaacagtgaaagagaattttgggaagatgtcatggtgattatgatgatgatgatgatgatgatgatgatgatgatgatgatgattttgtgtgtgtgtggttttttttgtgtgttttgtgtgtatgtgtgcatgcacaaacatgtaaattatatctatttgctttatttagggtaagactcaattacttgagacttgtgagcatagtaaatgtcaaaagttttcaaaaaattaagacattaataaactttatttgttttcagctactccgattagataatctctttgcttactggaatgtgaagtctgagatgtattatctgaatgattatgacgaatcattggtaagtaaatatttgtatgtatacttgttgtatcatattttgtataacatttaactcgaagtcaataatccatccttataatcagtattgcttctaaacaaaatccagtaagatttttagaaacagaatcaactggaaccttctttcatagtagttaataatacattgcttagccattttaaaattttatcctggtgaagtgtgaattatttatttacttttcaatggctcttaactattcttatagataatataaacttgtaggattaaggtatatttgtataaatataaataaaaacaatttatctttcaataggaagccttgagaaatggtattgtcaatgaaaatattgttccagaaggttatgattttggtaagttattagataagataaaaatataattagcaaaattagcacaaactattacgttaacatggttaatatactgcattattttattttacattaaattttctctagttttatatatatgtgtttctgtgtatatgtgtatgaaaatcaaaatatacttttcaacatatttttattgttggaatctttgattacatttcaaaactgtaggaaaaatgtctaacaaaagagaatgttaatgaatcatattaaaactttatgattatcattatcaattatagtgatgtttattaagacatttcagggctgggtggtggtagcacacacctttaatcccagcacttaggaggcagaggcaggtggatctctgtaagttcgaagccagcctggtctatagagtgagatccaggatagccaggactgtttcacagagaaattctgtcttgaaaaaccaaaaaaaaaaaaaaaaaaaaatcagaatcacaattacagtttaatatagctacctgatatagctgtagtggtatgatctttgtgtttataaagtgtcctaataatattttttttcaaacgaaggtctcattcattagccaaggcttgcctcatatttatgacaatcctcctgccttacccaaatgctgagattaaagggaggaactaccttatctcacttaaaatttttggttttttactgttcagttattttaaatgagcatatattacccccactctgtagccttggctgtcttggaactcactgtgtagttcaggctggtatcaaatgcacagttgatagctcctcctgctcctgcctctgcctccaaagtgctgggattaaaggcatgcacctatgtgtctggcctatatattaattttataatgacaagataactactaaaatacagtagaatgaaatgattttaaaaacattttttagccttgagatcaatttttagtagttgacatcaataaatgtcaactgttgattcttaatttagttcttgaatttggctttctgacattataaggcatagaatattcttctcataagttttcttggcatcagtgaaagtttccttatgtaatgctatttgttatgtgtgctatctaaccttttcataatttccccaaaggctgtttttgaagttgtctttattttttgttttcagtgctaggggtcccaggcagtcactctgtaactgagttacatgcccagtcctttgtacccaaaatctaattttcattattttgaagttggcttttgttcctaattccttcttagaggaaataggaggtcagataactatcatgtttctgattctcaaatatgtttagatttgacttatattttctgtgtattagagtatattgaagaaaaaaataatttgttagaaggggattgaaataacaggttcaaccgcttgaaaagtagaaagaatgcagatgtaggaatggtaagatgaaaggaataaaccctatgtttgagttaagggtaagtttctaaaaaagaccctctgcctcgtgggactaaaactcagactttgttgaaaatgacatgaacattattgaggttcagaatgtctctgtactattgtgttagcaaaacttgttgcaaatccaactgatgagactcatggactgtgtctccctgtctttgctcaacgttggcagggtcctgggggaagttgtttgctggctaacattagttgctgtgtagtacaaaaggctgaagaagtcctttatgcagtaggaaccagacactggagaggtcatcttatattagggcaaggtgttagtgaactttgcctctgtagaaatctgttaactgaacacactgggggacctgacagtgtaactcccttctgttgattctcttaacatagcattaggcctgctggtaaagggggaaaaaaattctagaatactaatggcctaaaactgtgttgttttccttttctttttaaagcaagtattgaaaagtgaatttggtgttcgtaagttgatagctgcatactagggaggcaaggaacactgatctgggtcattccttcttgcagtctacttcctctcctttcctttccttctagttaatggaagaaataatacttttttatatgctgaggtaggaatgatacaatggaacatgaaaaattaatgatacaagagatttgggaggttgtctgtattgatgtgggagaaggggttagtgtctattgcttaaatgcagagggtttttttggtgggggggggcaggacataatcagttcatctttaagacagttttgttgtaagagacaatagtattgactagatcaatagggatgataataggagttaacagtttcgcttcagagtatgtatgcatgcatttttaaaacgtcttaggtgccgaaggcatttgaagagagaaactatgaaatcgtgtgtagaagagagagtagactgaattcagcattgtttttggagtatggttcaaattagcagcattatcatcacttggaaaattgtttgaagtacatatttctaggcctttccagggcctttttacatcttactctggggtgagactgggcactggagagtgtaataagctctacaggtgattctgatgagttctctggtttgaaaaccattgggcctagagtaggttagacacacaaaaggtcatgtagtcagatattttacatttttcaggccaaagataatctggcacatatactcctttgtttttctaaaacaaccctttaaaagtggaaaagtcattcttggctaactggccatcaagaacaggctgtggcatgcatggatttggtcagtgtcaatagaaacaagtcaaccttaaaaacaaaatttaaaaattaattggtgatggatctttagcagtgtaaacatgggcacaggaagtgctgtgttatctccctccaccccctgtagcattaagaattcacttcatatttacagtattaaagtgagaatagtgaatatgattgtgatcttttctagccacattgtgctattaggtccaagtgtgggttttgctgagtaagtactgatgtagtaagaagggcatacttgttgagggaatggttaaaataactgataagagagtagaattggagaagaaacaaggaaaggatcatcattgggtgcaaagttacatttagttgcaactaaaggtcctggggtgctattccacagtaaactgattatagttaacagcatgtgtatttcagaaagctaaaaagtgaggctagagaaatggcttagcctggttgagaatgcttgctgtttagtcatgaggactagagtttggaacctagcacctgtgtggggcggcttacaaatgcctgtaactccatctctacaggacctgatactttctctcagcctcccaaacccctcaaataatttttttagaagtgaggaaaaatacattgaaattttaaatcattataccaatgtataattgtaatgtatgcatgtgtgagaacagtacatggatcctattaatatgtgtaacttttatatttatagctattaaaaacaaggaagtaataaaataagctttattcttagtagtgtaatgttagaactggggaaacatgccaaaggtgaagggtggaggggagatggcagatcagtgacctttttttaggtccataatgtttaagtattgatttgttttcaaacaatatttatgcttaatatgtaaaagaggttctagaggtggttaacacaaacacattatgttatctttatatgcaccttagtttataattcagtagttgatccttgtatagctctccctttgcacatttattacttctgcttgctatcatttgatccaagcagataatcctggacaaattagtattctcctatctacttgtgcaaattgaaagtaggactagtttacagagaaattgtcataaaatggagtcagtgataaatataatcttaacatttctaatatttttaaaacaaattaaaatagaattaaaaattattcttctctactaattcctgaagagtttgtctgatcaaactcttagcattgtgggtatttgggattgtggagaagctgtgaaagaggaggtacaaaggagtatttctggttggtctctttagtgcttgaacatgtttgaactaaaactctaatttttttcaatttgtcttatttcctagtttttcgacctatatctgctaatgccaaacttcagatgaaccggcgatcagattttgacttttctgaacccaaaataaacctggctgttgagttacataccatagtgcttgagcttaataaaccacaggtgatttttttttttttttgatgccatttagactgtgagttattgtttgaaaagagcaaagttaagctttaagtgttttctgaaattctaagttacataacattcccttaaaaactcagcaatttaacttttgccttcagtaatgaacaggaaccctgaaacattgaaaggtttatttaactttgtttctctagtatttcagtctcatggagctccttgagtcagttgacatgatgtcacaaaacctgccatacagaaaattcaagcctgatgtgcctcttcactatcatgccaaagaatggtaaatgcttccattggtttgaatcatctaaaaaatgtgaattaattttgttatttctaatatttaagattgtatcagaaaactaaatttactatgcttcttaaagctattctaagatttagtgaaactgatttgtggctaggaatatatgttgctccagaaatttttaaaaatgcaatttatgcctaaaaatcttaaaatactatagttttcacatactgtagaaggatcagtatttttgaaatgattaaacttaacttgatttgttttctaacagtgtcccaccccctatcccataactctccttttcttcccccagagtttcttatttgacttattagacctgtattgactcagcttgaattctaatacatgagacagatctgggagacttatccatgtaaccccatttttaaattaaaaaaaaatttttagagttgtagttcagtttctagaacttgtaggacttgttttccaattatgccttaagttgtgcagagctaattttttaacagaacttaatgttttgtttatttttatgttgtaagatatagtgataattgatgaaatgttgctatagagtgttctgatagaatattattttaatagtctacttattgtagttactcatgttagagaaacagaatcaattgttttagtatttttgatatcaatgtaattatgttatctttttttttaaataggtgggcttatgctatttacggtattcttgaagtaaatgttattccccatttacggatgtggtcatggaagcatattagagaccatagacaaaaaatcaaaaaatacagagaattttataagaagaaattaacaagtaagaagccatctcctgaaattctcatgtctttggaggttagcattttaaaacaatcattgaatactttgctgtgaataatttctccttagtttttttttttatttttaaaaaaaattgtgtttgtgtttgcgtgctcactatggtgtttgaagggaggtcagaggacaacttgcagtccgtttttccttcccactatgtgagttcaggtagtcagacttggtggcaagcacccttatctgctgagccacctctttggcccttttcccaagtttttagtgactgcctctttttaattacttagtctgctttttaatgactctctcttatttggatatttttgtgcttttactctttagctgtgtaataaaaggcccgatgacattctgcagtgagcttttgaatttagattattttcagttcaaaaggatttgggttcatgtacatcgtaatgtgaagattcatgttgtatcttttgtaagtcacagaagtgattgctatatcactattgatgatctggtctatgatatttctgtttgtatcatcttactgtgccttaatggagtttgttctgtatgtgtaagctccttcttaactatgtgcctgtgtagccctgcttaggtgtgtcctgttgtctcaatgtacttttaccttagtctatcatccttacacgaactttcctgattttcctcttgtacagataatttgtatcttacatttgtagtacgcatagtttttatcagcaacatattatctgccttgagctataatacttttttgtattactcttgtcttttagccttattgtgtaatctaaaaggaacctttaaaaaaaaacagataaagtatagtttggacagactggggataactaactttttgaatgtagtgtagcccttttggagtctagctggatttctaatggaaaattctgaaaagattgcatttttacattttcctttcagttttaagatagatgacttcctgaagactagggataatgaggaattttggagtctagagcccttttgggtgcttttgtaattcattacttagttatggtcctaaccaaaatcctctgagtgtactgggtagcacaattctgagctatgctgttttctagagtaatagtaagtccttgttgcttcttctggaggagaaagtttgaacctaaaacttgaaagtaatcacaagaaagtcacagatgtgatagaagtgtagctctcagattgtgttcatagctgtaacaatttgaaaaagcagaaaagttagagtatttttttttaaagatttttatttatttattatgtatacaacattctgcttccatgtatatctgcacatcagaagagggcaccagatctcataacggatggttgtgagccaccatgtggttgctgggaattgaactcaggacctctggaagagcagtcggtgctcttaacctctgagccatctctccagccccgagtatttatttttttagcagatttcaagtacatataagcctacttgaaatatcttaatgatataaactatgcatataagatggatttattacattattagttaaaaatggttatgatatatttacttttgtaattaaaaccctgatgaaagagattttaaacaatgcatgtatgtatccttttgaatgtatctctaacgatgtttatagagattataattatattcatttgttttggttgtgagcctagcctttaacggctgagctatccctccagccttataattatatttatgacagggatgatttctctgtttacaagttactctgttctaatttccaagctcctacatgtgtatatgtgtttatgtaagaaatcattgcatcccagaatgtaagagataacatattgatggtggcctgttttgtttttgtttcccactgtatttccttaatgtaatagcttatattctatagttgaatatgtaacattaccatacatttaataccttttttgcttatatttttaggagctggagaaaaccttggatgtttttaatataaccatagctagacaacaagcagaagttgaggtaattttagattatcattaaattaataaaaataaatcagatgtattgatatgacaggtaactatcaatattgtgtaaaatactgttttatgaagagttcagatgtgctttttgtgttaagaaaatttgatgtatgtttttgtaacacttgtttaaataggttgaaattatttgtaattgagcctatgaaaatttcagagttcatatgtagatgcaaagctaatacccacagcctgcagtttgtatatcttgttaagtcacaagaagaatcatctgttattccaaagtcttgtttggtaaacgttatagttaccatgttatgttgttagtacgtacatttgtttacatttattcaacacaaaacagatttgttttggaaatttcctgcttccatttcttttgattactaaaacaatttgtcatctattggaaaacttatttattttaggtaaagaaagctggatacaagatttacaaaggaggaacaaaagatcctgaggataaggcaggatggtttagctggctgtggacttggtcagaatcagatgctaaacaacaactagaagttaaacctggaagtatgttcttttcattttacattagtatagttaatcaccaagtgcataatcgtaaagcttttaaaaaaatctaattaaaacaggttaagtatatattcataatgattaattgattaatttattatcaaacttataaagttactgttattttcaaatatatgttcataaatagttgaaacaatcctcctgatgctgcagaagtactttacactgggagtagcacatgtggcataataattggtaactagaaatcgcagaatgctttaagccactggaaatttttcttgaagttgcttcttggaaggatttttttccttcttctctttttgggaactgtatgagtttcgtgccatggagtaagcccagacagggtcttgcttatattcaccactgagttgctgctttaactccttttttttttttttttttttttttttttgcagatttttaaatttgaattagaaacaagattgttttacatgtcaatcccagttctctctcccttccctcttctcctatcaccccccacacatacacactaaaaccctacctatcacatatcctttctgctccccaggtagggtgaggccttccataggatgtcatcagagtctatcatatcctttgggatagggcctaggcccacccccttgtgtcttggctctatgtggaatgggctcccaaagtccacacctattctaggtcaactcttaactattttaaataaacaagctttttttcttttttttcctgtgaggtctctctgtgttgccacagctgagtttaatctctgtgtctttctgactcagaccatggatagctgggattacagacaacatgctatggtgcccagtcaagactgtatagccttggatggttaggactggacttacacatcttggatttgtccctttttggtagtgtggcaaagttaggtgtgctaaatctgttttatccatctgtaaattgagagaaaattaggatagtatatcttttattttgtattgattaacgtagcgccaataagttcttgctttatacagagactgaaaaaaaattatattgtcaaaatttggttagtaacttactcaagaatcatttctaaaattgccaacacgaatctggtagttattacttgtaaaagattctacactaacaataaaatttgtgggccagcaagatgtctgagtggtttttgtttccaagtttggccagctgaatttgactcttgggttccatgtactagcagagaatcagcttcttaaaattatcttttgatcaccacttaatatgtaacacatataactccacataatatactttgtaatatgcatgcacatatacacactaaataaaacaaactattttttgttttttttataaagccaggtaaattatatttgttagtagcaaaaccataaagacacttatttataatttctagttcttgaagaaatgttgacacctgaagaaaaagtttcactttatgaagcaattggttacagtgaaacagcagttgatccaaccttgccaaaaacagtaagatattttcttgctttatatcttttcatgttagatgtgcctgctgtaattctttagaaattatatgttgctaatttttttctgtgattttttggggggggctataaatagagcatttatcttaattccaaaaatatgaataaaagtattcttttaatttttagggctattgtagtaattctttggtaaatgaaggattgttttagaattatcactggatttgggaataaaggagttgaatgaataagatagctttgtttatatatataccccgcctccacccatcctcacctctatcttattctggatattctctagtttgaagccttgaagttttttgttcacttgaaaagtatgtctattattctaagagaaaatcaccaaaagccggagctggtagacattgtagtagaaggacttagtacttcgattgtgcaaagaccaggagcacaagccataaagtaagtataaatttattttctttcacaggttaaatagcgctaatctcagtctgaaatagagaatttcaaatgttttgactattgacaggaaaatccacacctgccttggtgtgatggattgcagtacaaacacaggcacactaaaaatattgtatatgattaccattagactatataaagtataaataaattcatgtttagatgtgggtcctgtccccaagagatcacatcatctgcacacaaacactcaaaaaatcccccaaatctggtatcaggttccaagcatttcacataagaacactcagctcgctctgtctgtctgtctttagtcagcctatgtgatgaggtcaagggaggacgtccattttgtgtacctcaggagtacaagttttctagcttggatcagttcacaggtggcacagtggcgactttaaatggcataattatgtcatgtgctcctttagtggctagaatgtagccaaagactcataggctggaggtgaggcctcatccatgtctttgttcagcttatcaaggttttcacatgtatatgtaccatgatcattctggcccattcagtgtagttctggtgtttaaacatagaaaaaaatttcttattttgtgggggcacttagatttttgaagggtcatttaaacaacatgaatattttaattataggttaactttgaatcattttaagtagggtaaaatgacttcactatgccactaacagagttctcaaactggtcagcaatttaaaaaacatacaaaacaacaacagcaacaaacatggtaggtgctgttgggcaaacagattagttgccaaagtatgctgcacaagtggaaggacctgagtttgagtccaacatcttggagaaagccgggtgtgttagcagcagcctgaaatcctagtgctggggaagaggagacaggagcatccctgaaacttactttccatccagccccatttacttggtatgcctgcagtgccaatgagataccttgtctcaaaaaacaaggtagatagcagttcacgttttgtcttaaaaagcttcactctaaggttgtaatttaggttacagactttacagtcttttgtgctgtgatttaatgcactctttgtgtgtctagggacttagactttcccccatattatgtagtttttttggaattgttaatgtattatatttaatataaagtagcatgttattaaaacagagcactaaagaaaaaattaaaattagaatttgaccctacataaagaaacaacaaatgttaccatttctagcacagttccatgggcaaacctgactggggtggtgagggaatgaagaaaaggcagacacagacagacagacaaactggggttgggaggactggactctttggagaaactgcagcaccccagcagcacattgtgtatattatatatagttttttccctttttcttttttttcacttagcatgatgttttcagggttcattcatgtagaatgaatttgtaattaattttattgcctttgttctgttatttggagacactgtattttatgagtccattatttaactgacagatacttgagttgcttctaccatttggctgcaatgaatacttgatatgaacatggacaaagttttatttataaatggattttaaattttggggttatatacctaggagtagacttattatcttaaatggtaactgttaatgtttaacttcagtaggaactaccagacaatttccaaaagcaggtacatttgaaattcctactaccagtgaatggaatttccaatttcttcatattctcatgatacttgctattatttgttcttctgatcatgctatcttagtaaaaagtggtatctcacatatggggctaatttctattggtggttaatgattttagactttttctgtttttgtccattttatgttcatattcataccttgtttagaggaatgacctttaagcttcctctcccttttgattaatatgtattgatttgaattcttaacaattatacattcttgatatgtgtctttttcataatctttctgtggtggggatcagattcagggctatgtttatgctaggcaagtgttttacagctaaactataacctctccccattattttatatgtatgtatatgtatatgtatgtatgtatacacacagacacacacacataaatatgtatatgtatgtttaggtgtgtgtgtgtctgtgtgtatgggtttggaggtgctaaggattgaacccagggtacttcatatgctaggcagatgctgtaactacccaactatatccttacccttgcagttaaaatattctcatttttttctatttagtatcttttctttcttttattatgtccctcgcagcaaaaatattttaaattttgacctttgatttacttagactttttgttgtatatgcattttagtgtatctaagaggtttgctcagccaagtgttacgataaatctttttcaaaagccacctgagccccatcccacgtgtgagctttatgccagctgcctgcctgagttagggcccaaatgaatacacagagagacttgtattaggttcaaatgctgcttggccaatgactaggattcctcatctgttagctcagtcttaattatcataaatctatatattttataagacttatcttattggatgccttattggcgtccatccttgccagtggctcacatcctgccgctggaggaggaaggggaaaaagaggacactgactgtttcctcgcttagatatgagtcgccttgctatgtcacttcctgtctggatcaccacttctctactacatttcccagaatcccctttgactcctagtcctgtctaacttgctgccattggccaaacagtattttattcaacaatcaataagataaacatacacagtacattccctatcagccaagggtataatgaatatcttatgtatttctgtaagtattttatatgttacctctttaaatttagttttgtgccctgcttcaagataccaaatactagctatcatagctttttaatataaaattcaatgtgaatatgactcttagtgaagtaatctattaaaattcataggaattgtatattttctctcaaatgatttgagttaatatgaatgcaaagaaaaatatgtttactgtgttttataattttgctgtttgagaaattatttatgattatattgactcccaattcctgtccttttctcttacacagatttgaaaccaaaattgatgcattccatattactggtttaccagataattcaaaaaaaccccacctattgtcttcattggatgatatgtccctcttccagattacatttgagaccaaccctttagatgaaactgttgctcagaggtgtgtcatagaggctgaacctttagagataatatatgacgcggtaagctttttctgtgttacttatataatgtactttcatttgctttgagtttgtgttttatgttagtggtgcttattttaacagaggacagtcaatagtatagtggatttcttcagacctccaaaagatgtccacctagcacaactcacttcagcaactttgacaaaacttgaagaatttcgagataaaacagcagcaggtaaagtaatttgtgaattacataaaatattaaaattttactttagatgtatttctagactgggcatagttcaccagaaactaatctgatactttttcaggtagatacaatagtaattattttgtatacacagagcttatatttaataatcacatttaagttaattgaaaaatttcatttagttatttagatctctttttatgatagtgggcttcctgttttgatttttttactatgaaatccagagtttggtagataaggctgagaaataaaagttccatctcctgtcctcaaggatactgaaaggtgttatagatttataaaatatcttttagtttgaatttactaatacattttcaagtttgcttattatttatttgtgcttattcttatagtctttcctacaatatcagattccatttgtaattcaaattcctgaattccattccagctcatgtactggtgtttatacagtagaatcccaaaatatatattaagtaaaacctctctttccatcagttcctgttatatagacacacagatacttacaaataaatgtgaattcattgtaattaaatccagtagttagtcagattgagacttttttttatatcttcaagacatttttcctaagttcttattactcaacaaaaagtactaaaacagtaaatgtctgctgtattaagttcaaatgttataaaaaaaattgtatcttagaaagtacaaatctcccacttttttaaacttattcatggaatgtttttccttctccatctattgtcattaaaatttttgcagacagagcctgggctggcatgtgtggtgtctttagagttatattattctaatgggtttgtctttgtttcttagtctttttctcttaaagctcttaatattcttttgttctgtatgataaatattttgaatattatgtgttgtgaggaattttttttgatcctgtctatttggtattcttgatgcttccttgattggcacctccttttttatgttaagaaaattttcttcagtgggattttgtttaaaatattttctgtgcctttgaggtcagtttcatttctttcctctatttctgttattcatagatttgatctatcatagtgttgcagatttcctgaaatttttattcctgtagttttttagatttaacatttttcttgactgaggtgttcatttcttataccttgtcttctacctgagattctgtcttccttgtcttgtactctgttggtgagtacaaaccttgcctctgagatttttgtttgacttcctaaattttcatgtccgtctggggtttctgtagggattctatttatattgtcatgtcttgaattgttttcattatatcattccattctttgtgttttcacagactctgttaagggacttattcatatttctttaaagtccttgaacatattcataattgctattttcaattctttgtcttatttttcagcaatacaacatttctcaggttcttctacaattctcaaggttctgttggagatatggtgttttggtcattattgtgtttttgtgctagtgtctaagcatctggggttgtaacaacttgagataattttaggtgttgaatcttgttttgtctttattgggtggttctgttttttgatttctattgccctttctggatcttaggaatgtatgatggctgtatgtggtgatgtattatttatgatttaataaagccactgagatcaaaatgcaaagctagccacagccattgaaccaggcagtgctgatacacacctttaatcccagtagtcatattagctagccatagagatcaggcagtggtggtacatcctttaaccccaggactcaggagacagaggcagaccacggatatctgtgggttcaaggccacattgagctacacaaaattgattcagtctaaaagagaaacaactcacacaagggtgatctcagcacttgaattcacatgcctttaatcccagacaggagtgatatggctagatggagagagcaatataagacagtaggagacaggaactcagaattgcagtctgaggcttggtggagagcagtgccatctgagaatttgtggagataggatggccatttcagtctgaggtagaggtaagagctagtggccagctgctttgcttttctgatcttcagcttgaaccccaatgtctgtctctgggttttactattcatgttacagctgtatgttgcctgatggagggtgcttcctcaggtcagtgggtggcagagaggcatagagatcagcaagtaataaggcctgggcagggcatcaggaagtagctaaggggaactcgttcagttcttgaggtagggttctcagggaactgggggtgtgatgagaagagggaattttatcagtaggttgcattaaggcccaattgtccagagagacagggaggaaagagccaggggtcgctgggtctgacacaagagtttggagtctccagtgaatggagtttagattggaggagaagtacctgtaagaagttatttggctgagggtgacaatgaagacattgtgatggaggccaggaaggatagtttgattcacttatgtatatccctgcctgatgtggccactgtggttgtctggcagagtgtttctgagtacagatgactgacacaaaggaatgaatgagggagtgaggaaagctgaatccacaaaaaggtttggaggggtactcagggattgtagtgagggaggagaggcttggatgagcaggctgtcttaggactgaggaagagactggggagattgtagtagaggacaggaaggagagtggaaatcacctactggagtccatgttgaatgtggctgatgtgattcttagtttttatcaacttcacaattccatactttgggcagctataaaactgaaatgtatctactccattccatagacagaagctgaacagtaattggaacagaatgaattattagcaataatgagggattgtcttactcatttaaaaagtaactttaaaggtaataggaagggcacttacaaagaatattacagctgaactagcagtatccaacctcccagcctgaagaccaggccttattggagaaagtaacagctgtgacttcctaaatgacattgtggtttcacgttggcaaaactttatggaaatctatcctcaggtatgggaaaagtgttcttgagacaatgtcttattacatatattttatccataactaatttagaaggtccagaagacagatgcttttggttctcctattctgcctggtctaatgttggagaaatcctcactgttgtggagggaacacactgacccaggaagtgatactctttccttctatggtgtggtgtcttggttctgtcttgagtgctaaggaaaaacatttacaatccttagatgcacctttataaagcaagcaagtatgtgaatttggagctgagttaggaaacaaatcattaacagatccaaatgctgtcagagcattgggattgttggtgagccggatttagttttagaagtgagactagagaattgtctcactgaagtagtgtgaagactagaaagatttatattcatggtacacctagctagcttaaagagtctttgaggcagtggtaaacatgggaatattctaacttggaaaatgattgggggaaatatgaaggactatgttttgattcagttcttctactatttccctagttaattagatgattgtcagaattctttgatctatggtctgcatcatccctggccttcacttcacctcttgccattttaagaactttttacctgaatctgttttatataagttactggaaatgcaaagaccctttcttcccctctctatatagcaacctagagaggtcctttggactttctttaaagtttttatagtttctgttttttttgttttgttttgttttttaaggaaaagctgttcccaataatggctacttattctatacatatataagtatatattttaaggtgtttatcatcatcatcatcatcatcatcatcattttgagacaaaaatcttactgtgtagcacagactatcctaaaactatcctttattctcagtcaatctcccaaatggtaggattataagtgcaccaccatacatagaaaattattatcaatttaattctctttttctttcacatgcatatcaagctaatgattgctgtatttgatattgggtatctgctttttaagctttatttttctctgtcattgtatatataatacatatttactaaaggtactgactttatttcagacattcttagtaaatccatagtcttaaaaaattaagtatgctgatgtactttttactttaaaccttcataatgataaatatggtattacaaaacatttaaatgatttttttggagtatttgcttttgagaaaggaagtagatcatgataataggagataaaggagttccaaataccaatgtgagctgctcaagtattgagctttttgaatcagttcttttacgaaaattgtacgacatatctgaaaaatgctctgtgatttaatgatttttcttctcatctcatattctggtgatatttccaaacctaggcatactgtgacaaaaagaaattaaattacatctaatctggacctgagtaccagggcttacacactaaataatctggatcacattatccttttccatatattatttttcattataattaaggtgaaaaatctggttatgctggctagttttatgttaacctgacacatgctagagatagctaggaagagtcaatcttaattgagaaagtacctccataagattggcctagaggaaagtctggggggggtattttctcaactgatgatttgtgtgagagagcctagctcactgtggatgatgccacacttgggcaggtggtcctaggtgctataacaaagaaagatgagttaggcatgaggagcaaaccagtaaacagctctctccatggcctctgctttggttcctgccccaactttacttcatgatggcctttgataagaaaaataaaccccttcctcaccaagttgccttggtcatggtgttttattacagcaacagaaatgctaactaagacatcagtgaaatatttctgttgtagttttgtctttgtgagataggtgtctttctacctgtcatatcctaaattgttaaagatcagaatgtgttttatttgcttaagctgacttaatgactgtttgtacatagaatataaataattaggcttacaatacttataatatgatcctggccttagaaaaataaatcacatgaatttagtatgctaattagatgcataggaatgaattaaatttattagtatacgatgacctaagtgaatgaaatatctaagtaatagagaactgggtttgttaccttttctggtttacatgtgattttgttgaagatgacttaatgactgagggtttttcgctgtcataaagtcattaaactttgtattactgttcagtatggtaggtgtaaatgttgttagatttgtgaattgggaagaaaccatacaaattctaatagataccagtaaatgctttttactatctggctttatttatttatttatttatttatttatttatttaggtggctatagatgtggatcatttgattcacaagcatgaggacatgtgtttggatacccagaactcatttaaaaagccagatgtgactgtgcacccctgtaatcacgtcagtagtgagatggggtagggaaaaaagattcccccttaggatctagcctagcccacctggtcatgatatgggccagtaacagtactgtctaaaaagtagaagttgtcggtggaccagtagcagaaattgtcctctaacctcttcagtgcacatgctgtacacccacccatccccgtcccagtgcctcagaggctaagaacacttgatggtcttctagaggacttgaatttagttcccagcaccacttgaaactctagctacaggaaatccaacacacttttcttgcctctgtggggacctagagacacacattcacactgacatataaacacaagtaaaaataaaatatttttaaaatcccttcccaaagcctccatttattggaggtgaaggatgctccagttctgttctttgatttaattagtttgtgagtatattgaacagtaaaactgtaaacttatattgtaaattctttgctctggggtattttttgtttgcttgtattttttgtttttggacattggagccttactgtggagcccacaatgggaacctaacttgtagagcagactaaccttgaactcacagagatcagcctcagtctccccaattaaagccaacacacctgacttttgtctaaggtatgttaaaatcagtactgactttatggatttttaaattgcttttttcatgtttgttgattctcagctttattttcataatgtaagttatgaaaagtactcattgcaaggatttaatctttttgcaggtttattgtatattattgaaacacagaaagttcttgatctcagaattaatgtgaaggcttcatatgttattgtcccacaaaatggaatttttagtcctacatcaaatctacttctcttggatcttggtcatctaaaggtatacactaataatgtttgattgatgataagccatttgtgatattcttttatttaaaattgattttattaagattaatttatattgattatattgatttatattttatatgtgagtgtttttctgtgtgtataccataccagatttgtgcactgctcaaagagggcagaggtgggtcccagatctcttgaaactagagttacaggctgttgtgagtcaccatgcaggttctgggaactgaactcaggtcctctataagaataagaatagcaagtgctcttaactgctgagccttctctccagcccctgagtatatgctggttttagatagtttgattaggttcattgatgtataaatgtatagcggtactaggatctgagaaacaatccttgtgattagtgaatcaagtttcacttcatcaggtagtttttttcctccctgtattttctaaacccaaagtttcattttagccttacaagccagtgataaatattaagaattgtatttatagacttgaaagtcatacctaagttttttactcttcattttaagtgttatttgatcaagtgtatataatggggacagttctggacagaatcatctttctgaagtttttcatatataagtagaaacttttttttagacttctgcatctaaaccaatcattatagtatccattagtgtcatgtaattatcaaagttaaagaaaaatcaatttaaaataaaaaaattcaacttgtgttgagtgtttactagtcagagctggttaatggttgctgtgatggacagtccagatgcagagtatttccatcatcgttaccattctgctcctcacagatgttaaatgtaaaatacctacaaaagtctggataccttccgtgccttttgtctgcctaagaactttgttttcctgttactttgcacttggtatttatttatattataaataaacttaagtttacatagataattgcttatgtttgattttgactatgaaattatttcaagggctatttaaaaagaatgtaaggattaagattttaaagatttagttttgtgacattagctaatttgtcttgcctgttatctaaaatatattgcctttcatagataatatttttaaaaagttttaaaatttagttttatgtgtatgtatatttgcctgcattatatatatatctgtccactatttaagtacctggtgcctgtacaggccagagagaggcattggaaaggattgtgagctgccacttgggtgctaggaatcaaactcatgccctctggaagagcagtcagtgctgttaaccactgagtcatctttccagctccaatcttttttatgtttatctttgtttttgagacagagtctcactatattgccctggtatcctagaactcactgtgtagaccaggccagcctcgatctcacagagattatcggcttatcctctcccgagtgctggaattaaaggcatatgtcattatgcctggtgagataatcatttttgacagtctactccacatgaactgtatgaaacagagtaagaaatgttaatatatgtgtatggatgtatttacatttaaagaaaaatttgttttggagtgatctctggaatatttaagaaaaaaaaataatgtgcacagtattccatgaaagggaagattaaaaaatatagtgtgcttggagccacataacagacagtaataagccttgttcttttattacataactactaaaaatctgttggaccaaacaatagatataagctacatttttctcgtcctgatcctaatggcttttctttagattttaagtttttgtaaagatgtattattttctaagattatcttggttcctctcttttgatataagtaaatttaaaaatacaactcattttatgaatgtcatcttatacccgtctttgttgcacatctgtttttaataactgtatatatctgtcagtgtatcctgtcctgttaaatttttatgttatagagctaaacagtatttttactttgaagaactttacatggtctaaactattaaaattaactttaaggtgacaagtaaaagtcgatcaggattaccagaaatgaaaacaagtggggccagccttgaagagataatgcataaagcttatgattcttttgatattcaccttacaagcatacagttgctttacagcagaatgggtaagtacaagagatgtaatggttgatttttttttttttttaactagtgattcattaggtttttaggttctctgaagatatgcttgaagactttccctctatgtgcttggaactttcgtatttgtattaaaattaacagtaaatattgcatagtgaatgcaagatagttgatagtgaaagtgtgaaaccttaaacacaactccagtgcttcagaatagccatttactaagatatataactgggcccatgtgtttgattggcgctgttaaaccagctgagtgattgatatttttatttgtaagataattacaatgatttaatttaaataagaaaataaacattgactactaactgaacaaaaaaatgactactaatgttttcctggtttggaaccaggaaattttgtttcccagtccatctagataaaattttgtctcttactgggaactggggcttgctcatttggctaagctggctgattggtgagagctctaaagatctgtccattgccaccttcctagtggtgggatttcaagcatgaaccgccgtgccttttttttttttttttttaaagtgggtactgggagccgaacttaggttctcatccttgatgggcaagcactttacaaaatgagttctctctccagactggctccatctattttgaggctgtaaattaactattctttcactcacttgtagctgttaacattacagtaaatgtttcaggtcatgttttgtaggtctacgtatgaatttcaacttttgcattttaactataggaaagttttgatcctgttttctaaaatgaaatgattacgattcctgggaaaattgaaaatcttgactaaatggtgccatttattagtggctatcaaatgcacttacacttttctgcctttttcattgccttatagtggcattattttggtggtagaatatctggttggcatagtgattgttaataggtacactgtatgtttgaccaaaactatgctaccttttaaaaaaacaggcctttttcttttgtaatagaacatagtctggtaaagcagtatggggggaaaaatggaaatgtaaagacttcctttagataattttaggttttgtatgttataaaaattaatgctaacaataaatatgaactgtttctctgattaggtgataattggaaagaagcacgaaagctcaatgtatctacacagcatattttgacaccgatgcatgtcaatgtagaactctctaaagccttggttttcatggatatcaagatgcccaagtatgtattatatgtcatctgttacacgtaattgtgtattttctcagtaaatctgtaatgaaagaaacattctatttcattgactttattacatagaatgcatgttacaccatttgctactgatgccacttttaataggtagttcagtggcgtcttagtaaattcacattattatgcagccatcaccaccatctagctctagaactttatttgacagtcttcgaagttgaatgttgtactcactaaataataacattccattctactctgccttttgcccctggctacccaacccccttacatggtatctttatgaatttgatggttttaggtactggagagaagtaaaatcatataattatttgttatttcttatcgatattacttcactcacagtgtacttgggattcatctatgaaatatatgaatagtattttctagtcctcttttaagaacagaatttttactgagccctgcctgcttctttctatccattcttgaaagtaggatggaagtttactactattgctaaaagtccttttcttcaccttagttctttcagtatttaattcattgaactctgttgtttggaatgcatatgtttttaattgttactgttattgtttaatttgtccatttacttcattagatagcattctttttaaaatcttcagtaatagtttttgacttgtaatcttttttttactgcaagcatccctctcttttgttgattgtttaggatatctattttaattctttaccttttgacatatgtattttctttaaagtgaatcttctgtaatgatatcatatggttggatcttaatttttattcattctgtcaacttttatgtcttttgattgggaaggttaaaacacttaggtctatacactgatatggtcccaggtccatccctgagtgggaggtactggaccaggaaactcttagctaaccaatggtgataaagaccagacacaggcatcttgccatttcaggagggctctcagtccatgctggaaactggagtctccagtttaatctagcatcctcctaaatagcttaccaacaggggtggggtgaccacagaaggcatctactatcatgtatatacctgataatcaagtaattattttaattcaggagtcacctaaacagtctctaggcacataaacaaagttctcagcacaggtgcaggcacactcagggcctaggtctgttgtaactaggagacattctccactgaggccaagccatctggtggcaatttagcaagcatctgcaagaaaattgcaggattcaggctcctggaaaatggagctgaggtttggaccctgagaaactttataatcaataattttggtccctgacaaccatatacttatttttatgtcttaatttctgcagaaagtgatgagtagtcaaaacccaaatcatagccctttttaaatatttgtccatgcagttaactgtactgtgatggctaactagacagatttaagataataaaaggaaacttgctatttagtaagtaacattttgaagcctaccctcttcacattgtacatcttgaatattttaaggaaggaaaggttttgctgcattaattgaattgtcctcagctgtgtaattaagttaaactacagtgtgtggaaatagttacaaatatttaggttattagaaataaagcttaagattttctgaaggaatttaggtaacatttttagagaccaatgtttgacaacagtaatgtatcatttgaaaaaaaaatcagttttaaggaaaagtggaggtaaaatcaatgagctgaaacattctgtgtgagggccataccttttaaaaaattcttgtgtgagagtgtgtgctcatgtatgtttgtacatgtgggcatgcacatgtgtatggaagccagaggttgatgtcatgaaccccaagcacatcgattggctggacagtgtgggagctccacagatgcacttgtctcccctcccatctctttcaagtgttgtgattacaggtgcgtgtccctatgcccatcttttagttggtactggtatttgtgtctggtggtaggcatttttccaatggaaaatttttctcaacctctcttctttttttatttttaatttttgtatattatgtgtaatttttaatgtttgtatattatgtggaggcctttcatattcaggcactaccgtgtgcatgtgaaagtccaaaggataccttgatggagtcagttcttaacttccaccatgtgggttctggggaatcaaactcagatcactgggcaagtgccccttaagggtaagtgcctttaccctctgagctatctctgggcctagcccccctttagttttttatcttatctgtaagcaaaggagattggcaagacagaagaaaaacaaatgaaattttgttttgaattatggtttgggatataatatctatagttacttgaagttggtaagcttcaggttttcttgtaggaaccatgtgcatataagaacttacacgtagtaggggttagaaataggctgtgatccacataggtatgagtacacaacaatgccatataaatactgtaatgatagtaacataataaataattgataattaatattgtcatctgtatttggcaaacactagagaaacaataaatgaaataataattggaaaataagcctttgaaaagtattaaggctggtccatctagagtttataaggtaagctctaaattatagtgatttgtagtttcaaatttttattttaaatattagttgaatctattctcctttatggttgtttggtttttgttttgttttagctaatcattgaactcaggacctcctgcttgctcagcaagccttctttcactgagtcacctccccagttcccattttttgttaattagtgtacttaagccagaatgaaaattactctatatattctttattctccatatactctataatgattcctgtgtctataaaataggttcaagatttctggaacattgcctcttgtttcattacgaatctcggataaaaaacttcaagggattatggaattgtttgaaagcattccaaaacctgaacccataactgatgtatctgcccctgccagatcattccaggtaaaaatctttttcagaattaatgaaagattaaattgaaaagtagatttcaaagtagtagatgaaattaccacagatgaaattacttaacagtcatttgaattttaagcagaattgtaacttttacccaacatccccatggtgtccatttacattatggatatttaaaattatggggaaaaagactactttgacttcataaaagaaaatctgaggaaaaaaagagacactagaatatgtgtgcacagcaaagacaagtgaggatgcagcaagaaggtagctctttgcaggctaaacgtagatgctttgaaactagtttaaaataccttaatccttgaccttctggcctccagaattgttagaaaatgctgtttgtagttttaaccattgattttgtggtcttttgttatggtagccttggcagtttcatgcagattttgataccaagaaagtggggttgatgcagtagtaacacttaaaactgacattagaactgtattacaggtaagatgggaagaatttcaaggcatatgttagaacaaacctgcattctcctctggaggaaattatttatagacacatgtgttttaaagctccttctggtgagaactgtaatagaatctacaaacatagttttttatatcttaaaaaaaaaacttattctgagctatctcccccccctttttttgttgaatgtagaacttgtgatgaccttgaatagttagctgatatgatgtctaaactatgaagggtgcaatatgttttttctctccattattagaacatttgagaggtgtaatgaaggaaactaaaacaaaaccactgtgaccattgtgcagatgaaaaaggaaccagaacttagggctttagaaaatggttagtttatccataatgcaaaaaataagagcatgttatttgatggggcatcaggagtgttctgagatgatgatttgattaaagaattttatgtcacagattcaaccattcatctcctagcgcgtggactaaaggactagaaagggaagcaaagtgaagaaaggtgttgcaccttaaaaattatatagaatatgagagtactgctaaatagctgcaagcacacattatccttgagcagaagaggaaagtaatgtcctctaggtgattctgagatcatgtgtcacagccctttggtctgaatggttcaagattcaagggatgaagcaatctcattatcagtggactggactgctgctgaccaggacctacagacagggctgcatttagtcttttcttactgagtatgataatgtagacttttcttagacatctttcaccaaattaagaaattaccatctatttctagctccctgagcatttctcttcaatagatattagggtgctatttctgcatctattaagatcttatcatttgttcctttagtctcttaatatgatgaatggattagttttgcattctcaattactatctcatctttgatggtatattatttttctgtatattacaaggtctatttgataatattaaggttgaacatctcttatcctaagttggttaggattagaaatattttaaaattcagacttggtctttttcttttttctttggatgttgaaatatttgtttagactttttcagttgaacattcctactcttaaaaatctaaaatgcttcaaaatctgaaacctctttaacatcatctcactgctcagagagtttcagatttcagaagaggaaagcaactagcaggagtgtgaggtatgtaggagaggataatgggaatgaaaaacatcaaaatgtatgtgacatatgtgtctataaaaatataatgatattcatagtttttatggtaaatataccctataaagtgtaaaaatctgtactggcttatgcatttgttagttacttaataaaattttgaaatttctaattttaggccaattcagatactacatttttagattagcatcagtgtaccttatctgaagtacttgtggctcgaagtgttttgaacttcttgggttgtttttgtttttccattttggaatattataaatatctaatgaggtattttagatgtaggacacagggtcaaaacacagaatttatatatgctttatagccacattatgtatacctgaatgtaattttatgtaatgtcttattgtggctgagttttgactatgacacatcacctgagatcaggtatagaatgttccacaagtggggttcttattgtcttcataaatgtttggattttgaaacattttcaatttcaaattagagttgctcaatatattttgtaggcattgaggctttagtgtttgttcatgacagatattggatcctattttctgtgggtagtttagtaatattagtgtcatgaagtgagttgggaaatgtttcctagtccctgaggtttggtaatattgaaactagaccaaacaataatgatataatggcctcaaaaatattaaatgatgctcatacttcttttttaatttttttatttaaattagaaacaagattgttttacatgtcaatccccattctctctcattcccctcctcccctgcctcccactgacaccctacctatccaataccatttctgctccccagggagagagaggccctccatgggggtagtcttcgagtctgtcatatcctttgggatagggcctaggcccacccccatgtgtctaggctgagggagtatctctctatgtgaaatgggatcccaaagtccatttctacgctagggataagtattgatctactacaagaggccccatatatttctgaggcctcctcactgacacccacattcatgggttctggatcagttccatgatggtttcccagtgatcagtctgggggccaagagctccctcttgttcaggtcagatgtttctgtgggtttcaccagcctggtcttgtcccctttgctcatcactcctccttctctgcaactggattccaattcatttcagtttttagctgttggtatctgcttctacttcccatcagttgctggatgaaggctctaggatggtatataagttagtcatcaatctaagagcagcaaagaaaaaagaccaagtaacatataaaggctcatacttcttcctaaataaaagcttggaagttactaagttttatgaagaagacatgtccaaagctgataagctgaaagctagccgtcttatgccagtcagccattcagatattgttattgtcttagttacttttctactgctatgacagagtactataaccaaggcaacctatagaagaaagagtaaattgggagcttgcttacagtttcagaggggttagtccatgactgtcatatcgagaagcatggtggcagcaggcaggcatggtgttaaagtagtagctaagagcttttgtcttgagacaacgaccactaccattattaggaacagaaagagacacagaatggcatgggtttcctcctccaacaaaaacaacaccttctaacccttctgaaatagttctttcaattggagaccaagcatttaaaccttagaacatatggggctatctcattcctaccaccacagtcatgttggacagatccaacattaagttgtcctctgacccacataagcattctgtggtgtgaacacacttgtgtacacacacgcaatactttttaaaattaaaacaaaaagcaagggcaggccttctacctttccacatatgaaagaaaaaaatccttataatgtttttatcatacaaattgcttatatccaaaatacgtaaggagatcatcagcttaacaaataaggagggaagtaaaataaaaagatgtcaacttcattaattatttgaaaaatgaatccatattgaaataccactaaacaatgattaggatggctaaaattttaaaaagacaccatggtgaggtatgacatgatgagaatttataacctttcattggtgctatctgtaacccctttggtaattttgtttaaataaacttaaatatatacttattgtatgacttaagaattctgtatttttacctaaaagaaatgaaaatgtatggctacacagagatgtgggttaaaatgctcagtggagagttatttgtaatattaaaaagttgtgaaaatataattgtcaggaaagaactggataaaaaatacagtggaatttgtgctggttagtttttttgtcaacttaacccaagctagagttatcttaggaagacaatgaaaatgccctcagcagcttggcctgtaggcaagactgtgagtatatttgccaaagtatcattgaaaattaacagtgtgtgatcctcagttcttaatatcaggctttgagcttgcttctcaagatatccttgagctggattctgggctaagtacattttcaagttagaacatagctcagaatcctaacagattcccaaggaattcccacaattacacttaccaacagacttcaagtaattatcacactgggttatatgtagctgtttttatacaactatataatatactttgaacatattacctctgtaaaagcacttcatttttttttttttttaaactggctctcaggtagctcaagctggcctagaactctctgtgtagccaaagatggcatagatttgttatctttctgctttcctataagaaatgttaggattaatggcatgatctacaatgcctagctttatgtggtgtttgggagtgcagacctagggcttttcagtaagcactctatacccattgagaaacaattcaaagcactttagctttcatacatcttataattttcttgctttagacctgatttcttctcggaatgaattaagtagcttttgtcaaaattaccatataaatttgaataaaaggtctttattctgattgacagtgagttacttttgtttcagaatcaagcatctacttctttgccagtatcacatatttctcagaagttaatccctttattggaacagccttgtcattctgaaaatggtaaagtgaaactgcttaagagaatgtccttatttacacatgcataggtgaagtagtttacatttgaggaatgtttacttcaaatgagtatgtttaggggtaaaaatcatcttttaacatctgtttttctgtaaagagaataatcaacaaatttgttaaagtttatgtcacgtgttcaaaggagacattccgaaatgagtcattcaagaagtgattaaaagttgggtttatataacagttttcattgaacaaaagaactcaatactactcaatttaaaactgttttgattgttttgagcagttgattaatggaatctttatgtagtttttttatactatgattgaatactggtaacaaaaaattacattaaatgaagccatagttaaaggggtgctttattaacatttctgggcctggcctctgttgctaatattacagagttgtaaactgagttctgttacactatccagctacagggaacatggtagcatgttgctttcaatattcataatgacacagtcattgttttcagtacatggtattaatttttgctataagtacttattcaattttgaaattgtctaatgattttttgaaagtagttttgtttttttttttttcatttttgagttgggagagatagctcagtggttaagagatcatgatgtgcttgcagaggatcatagctcagttcccagcatccacactgggcagctcactgctgcctcttactccagctcaagaaaatcagttgctcttctttatactctgtgagcacctgtattcacatacctgtacacacatatatacataattgaaaataaaaattaattttaaaaaatgattttatgccaaatattaaatattttatcatttccatactcatcatttgcaatgttattaattcaaaaggaatttctgtattcttgtctctagcttttgtgttcaacttttaatataaatccatagcattttaatgcttacatttatttcagaaaaattacaaaaatgttaaacatagattacttctgttgttgacttaaaatattttgtgaaatttagactcagaggaggaattttttgatgcaccatgtagtcccttggaagctcgttctcaaactgtatgtagaggtaaaagttctcgacaaaaaaaagattgtttaatgaatttaactcaacttgggatgcgatttgaagtagcagaggtatgtactatgattacgttaatgtgggttatgtgaattgtcatttatattttgtgcagtttacttacatagttctattattaatagatactgttcaaagtatatggagactagggatatgattttcctcatcttttttttttcaagattatttttcttaagaattagtatttaagtggtatattgcgggcagttttccaatacatattttttgttgatgattatgcaatgtaagtatgcattggatgtgtggggaaatacaaaatcaatattaagtttaaattcctaacatactacatatatatcttctgtattcatatattgttaccatataggtgacctctgtgttttgcctttcttctgcaggttttgattcagttttatcaccttgtgggagactgtgaactacctgtgctagaaacgggtgctttaggattgggtacagaagttgagattagaacatttgatttgcaagcaaatgcctttttgaaagagttgtgggtaaaatgtccagaatacttaggtaagactattaaaatatatacattatttttataatttgactacctgttgtagaattttctgttccttagactttgaatcaacacatttatattttgaaatagtcacaaaaagaaaagactattaaatttaggttaatctattttcttaatacattttaaactaaaatataccacttaccctttcccttccttctccaacacttcccatataccctccactttcaaatcaatagtacccttctttctttgaatataacatatatgtgtgtatgcacaaatacgtaaatataatctgctgagtctttttgttgcgtgtgtatgaatggcttcaaggctgaccactttgtattgagtaaccaccatgggggatcatccctgggagaggctaattctatttctctttgcagacattggtttcctatagtttttttttgtctagggttggaaccctgtgaaatttcccccattccacattagcatgtctactgatactgctattgttctggtcctcttcatgcagccatttctagaagagactctttcacagcagacttcctggctaatgtaatctttctactctctcttccatgatgttctctgagccatagatgtaggaactgtcatatccatgcatccattgatctctgtgttgtgattttctgtgatggtcttcatttgctataaactgaagcttcctgctaagcagtggtggtgcaacctttaatcccagtacttgggaggcattcagatctctgtgagttcaaggtcagcctggtctacagagctagtttcaggacagccaaggctacacaaagaaaccctgtcttgaaacaccccccacaaaaaaaataggaggaggagagaggagggaaaaaaaagggggggtgtatcagcacttaaatctagatatttggggcttggaaccacagatgaaatcttggcatttggaacaaggaaccacagatgagagagaccatgcaatatttgtctttctgggtcttgattacctcattgcatacaatcttttctaggtctatccatttaactgcaaattccatgattcacttatcaacttcaccaactgtgtgatatgcttgttacatttgaatgtattcacattgttatcaccccaaatccattttttagatttaaacatttgttaaactttttatgtatttgaaaaatatgtaaagggaagtttctatggtggtatcatgataagcatggtttcactgtgctgaatatctgctgtcctccactccttcttctatggtacctggcataagatcatctctgtgtcttccatgctttacccttttatctgactgtatgattggaataatataatatacatccttttaaggttcacttcttttagtaatctgtgtttaaatctttccttttcatggcttgacagctagttactgttgaccaacaaatcatattcctttgtctaggaacattattattacttatccactatatccattattgttacctatccacctatccataataggtatccattatgggtacttatccactcactttataaatgacattttgatttcttttcagttttggcaactttgtgtaaagatgctataaataactatatgaagattttggtgtagacctaagctgtctgtttctttggttaaatactaaggagcataagtggtggattatatattaaatgtataactttggtaatgaaccaccaaactcttccagtggttatataatttttcatttttgttggtaataagagtgattattgtacattctcgtcagcattttgttagtgtctgggcttgagtccttctagtagctatataatggcagtttaaatttccctgatgatatatgatgtagggaatcctttcatgtgccagtttgtcatagctttttggtgaatggtatttaccaagtgccccagattgaatatctgttcctatcttatatacttccctagagctgggattaaaggtgagattgcaagtgctgagatctcctttgtgtgagctgtttctcttttagactgattcaatattgcatagccctgggtggccttggactcacagagatccatctccctttgtctcctgagtcctgggattaaaggtgtgtgccaccactgcccaacttctgtagctaactagtatagcaggctttgcattctgatccttcaggtaatctttattaaatcatgaaatatcatcactagaagtagtattagtcattgttaatttttgtgtttatgcctttttttctttctcaaaggtaaagtataaataaaaacttgcaaacaaaaagcattctgtaccttttcctaaaacagtttgttcttatttctaaaaatgagtgagtagcagagttttgtgagaagcaaatgatctgttaaacagctattcaagaagctggtaaatgtgtaaatgaagtgtagatcttaaggttgaaaaatatagttaatacctaaaataggaagcttgttcatgtgcttatagtttttaagtttgaagacttgcatggacattgtgccatattttcctctgcaagaccagtgtaattagtttgtagtcctttttagcacccataagtaatttggtaatgtagcatgaattctaattggtcttaaataacaaaaactgagagtcaactatcaggggatgaaagctgaaggatcagagaagcacagcagccagccactagagagttcttacctctaccaatgctagaaccaaagaggccatcctgtccttagactgcctcctcagacttcttcagactgacttcactgagctcctgtcttccgcctagccatatcactcctgtttccactttcctactgctgggcttaaaggtgtgtaatcccaaatgctgtgatcacctttttgtgagctctgtttctctcagactaaatcaatttcatgtagccagggtggtcttaaactaaaggatatccatctgcctctgtctcccgagtgctggggttaaaggtagttaccaccagtgcctgtcctctatggctagctagtgtggccaccagctctgcactctgatcctcggttaacctttatttcttagattataaacaaaatatcattacatgataatgatagttttagaagctattcagatatctcttctctagcagttctcaaataggatacctttttgaacagaatcagtaatgtaactagtaaactgctctgtgctgctaagacagatttttatctagaatgtagagaaatgtaacactttcttgatgcatctcaacaactaatatttttagagatactcactgctttttttctcaaggcattgttatgactcaattctagaatttttaatgctcttttattaccactaaaagtgattttgtttcttcaacagcttgttagtttttgtcactgccttgtctagatgtaggaaggtttgagatttaaggaaagatacattgtatggagaaataatacttcttgtgtttaaaaacaaagaaacgactttattgagtagagtctagggaaatctttttcagtcataattactaatgccttcatttatcttagtataattttcctactaagcattaatccttaaactatttttagatgaatacaagaaaccaatttatttggtcaccaccctggataacacaatggaagatttgttaacattggaatttgtaagggtaagcagttttggcttcacctaatgggcatgcaaatgtgctattgaaatttataatttagtgtccttaatccttactctaatgtaactttgtcagttcctctgttttaaaggtctttttgttttgtcattattgtcctgtagtcttgattcacaaacacttcatacaccacacaaagtaccctatgttctaaggatctctgggctgacattttcaaccagactattgaaaaagaaacaaatgtttagtgttgatgaaatttcttattgtatgggtgcaagagaatgaactcacttcatttctactgttgtatggttatctactgttttatggtttaagtgttaatgactccattccatttatattgatttataatgtcttttgaaattttaccaatcttctatgtactgtggcttccttcttaattattctttgttttaatttggcattgtgtgtgttacaattattttgtaataattatgccaagagaatattaccattacttaagaccatttttgctttcatgattgttggagatttttaaagatttttgttgttttattggtatcatgttttagtatatacaaactctaaagaaaatgaataaagtaattgtgttatatatgcatattaaatggattactattcaaaatggataaattatgccatttgcaactttatcagtttacaggccataatgttaactgaaataatctactcatggagagaaaaatacaagaggatcttacttatatgtagactccagtaaaattgaactcatacatgtgtaaaggcaatggtggctgctagaagatgggactactgtgaaaggaaagaatgaggaactgttaacaaaaggaaatagttttagataagaaggggaaatagatttgggatctcttggataacagagtaactatagtcaatagtaatgtatatttccaaggtaaatttcaaatgtcttgcagcaatatatggtagataagctaattgatggatatgtaagttaccttaaattaaactttttacattatatgcattcatcaaaatctctggtagtgtacctataaacatacaattatgtcattgtcaaagagaatgtataaatatttggaaagaaaagtggatacttctggataattctgccacaaattttgtttcaaatacaggaaaaattaggaagtaccatttagagcttttgaggaccaaatgattgctctctatacttgatactatgaaacatttttttttgccagataagaaaaagcgcatgtaatcttaattgaatacttgctatatactagagaagtccatatttagcacgttttgtttgttatagtaaagcagttgccttgttctggtcaaatagttgcttgtttgagtaaatatatgtacacatataggtgtgtgtgtgtatggatataacatgctaatcaactcatcttgaaaaatttacaactgtcatgcaattgtaaacataacatgtcttcctaacatattctaatagatacattttctctttggataggctgaaaaaaatgcacccaatttaaaaagtacctataacaatgttttacaacttattaaggtatgagtatataattatttattttaaaattagaaactgtatttctatgtctagatgtcttaacagtcactttttttataattggaattataagattcctgggggaaaaaaacttaagattttaagtcatgtgctttttactataaaatatagggtattttaaaagaccatccaatcagatgttttcttggcctagtactaaaatcagttttgttccataggtgaatttctcctctttggatattcatttgcacactgaagcacttctcaataccatgaattatcttaataatatccttccacaattaggggaacaatctgtcccagtgtctgttgcagagactgaagacaaaggagatatcattaaaaaacttggtatatttctttaacatttaaggggttttttgttgttgttgtttggaatttttagggtttttttgtttgtttgttttggtcactaactggaacagtaattttggactctggtgttggttttaattacacaattacctaaaatgattcatcatatgtcatgttaattttatagattagtgataaaggaaaatgattactgctaaagaaaagatgtttattatgtaatagatttgagttgaaagttagacaaatatttgatttagattaaaatagatttagattgataagacattatatttggttagaaaaactgtaattgacaacatttgagtattatcatggttgttttttaatcagtgcacattaagatttgagatccttcaaatccaaaacttcttgagtataatggcatcactcaaaaagcattttggagcattttgaattagagatgctctcagttaccatttagaactgtgggtatttgtgctttctataacgataattatctcaaagattcatagctattggtttaatttcttaaatgattagtcacctctaagagcagtctgatttgtttttgtactcattagataactcctttttagagttctcaattcagtagggaatgttctctctttgcttatagttgaattgtaaatctgatgttataattatttgtggtgatattttagctgcataggtgtagtgtggtaattactaaacctttctttgtgttacaatatgatttttgttttgtagctttaaagctacccacgaatgaagatattattaccttacagctattggcagaattatcttgtttacggatttttattcaggatcagaaacaaaacatttctgaaattaagattgaaggtaataccatctcataaaaatacatttaaaattatcaatttgaagattaagaaaagcaattattcattgttttattcccttaggacttgattctgagatgattatgaagccattagtcactgaaacaaatgcaaaactaaggaatataattgtgttggattctgataaaatggctatatacaaaaaggtgagtttttaaaattatttttactgttatttcatgtgaattggtgttttgtgcatttatgtctatgtgaaggtatcagatcctctggacctagagttacagacaattgtgagctgtcatgtgggtgctgggaattgaaccccagtcctctagaagagcaacaagtgctcttaattattaagccatctgtccagccctgagattttgtttttattaagtactaacatatcattaaatatgtaattttcatatcagttacatatgcaatatcagtgtcttatgcataatggattttagagttaaacacaattgatttattagttttgatacttaatatttgtgtgatccttcaattacccaatctagtcttttatttgtaaaattaagattatgatttttctaagtaaataatgctccaggaacaggtaggctttttgggtggtggttggatgaagggtattgataataatgcttcttttaagaacatttaaaaatagaagtgctctattctttaaatatcacgagctgtctacttcagataatgttattagagggtgtggtacatttcaagtgtattgtcatggatgcttgccactctacatatctgttaaaaataagagaatcctttgaagttgatataattggataaacattttgttagtaattctcgattaataaggaatttaagtagaatgatgtattgaaagaagtgatgacaaaatacttacgtataagatcaggaaaatctgaagggctctttgaatcaggaagtgagcatttagagtttgacaagaagaatgaaaattctgtacatgactggtcctagtctgttatcagtattgttaaaatttttatttatttatttttattctacatatatgagtgttttgcttgcatgtttgtatatatactgcatgcatatattaacagtgtgtcttatgcataatggggtttgtgctgcatgcatgtcttgtgcctgcagaggccagaagaagatgatgaatctcttggaaatgaagttacagatagttatgagctgccatgtgggtcctgggaactgaacccaggtcctctggaacagcagtgagtgctcttaattgctgagctatatctctagttctgtcatcattattgatatagttatcagctgagttttatgtgagaaataaaaaatatgtttatatatacatatgtaacaataaagaataatttaccacaaaagtctccaaatatgcatgatttacagaaataaggaacaaggttattaataatactgatgacaatttccaaagttattatttgctcctttgtcacttttactttatgatttatatataggacagtgagggatagggcacaagtttttatttttctagaaagtgatgctcacagaaataaaattgtctactaaacgctatacagatagtaacagaaatgaattatatccccgggcattgattttttccttctgttttttttttttttttaaatatagccaaattaaaatatagcttaaaagaggtacagattgaaaagtttctttctcctgtagtcttgctccattatcattgtcctttaattttctttggattccagtataggtagttttttaaatgaagtatgccattcactaactagaacatcataagttgttattttgtttgtttgtttgttttgctgtgtattaaaatgttgtaatcattattctgtgttatacatacactattgattgggttgaggttgggttgttattgatgaactaaactcattactgttacagattgtaactgtcagagcaagtcattgtgtactagaacagcattctccatttactagtttattgctgttaaatactataattactgaagacaaaaagcttctggcttaccagcattttgctagtttcttgtttctttttatataaagacattttgataattaagtttttttaaatacagttttgattgcttgttaattctgggtgacaaatataaatgtaattttaattagttttctctgtttctatatttgttatcaggttaattatgacttcataaaattagttgaaaaatgtttttttttttttagattatagttttctcttacccacactagaccattcccctcgtagtctctcattagttcagactattaaaaagcatttacttgctttgactgtaagaaaacttcagcctcaacctcttgattcccacactgaatgcaacttggaattacaaccctacccatatctgatttctaccggactcctcttcctttggttagatcatgtggaatgccttcccttttgtaccctgtcaaacttcactgaaattcatcgtgacccattattcttggaattgaggcctcatttccttcaggaccatgccatgccatccacaaaggctatctgtgtaatgaagctcctctttggacatgaaggctaggccctcctgcttctgggccagatcatggttgcctgtgactgtcatgttccatctctttctgaataaaggttttcgggacctttattcatgccagctactttttaccagaaatttgtgagacatatatgctattttgttcttaaatgtttggtatgcatcaacaaagattgtgtttgtttaaggctagggcttaattttacttttttcatacatgattaattttctattactgcttactagtaactgttattttaattcaaatagttgtggtggtggcataccatgatacccatgttgaagtcctgggaaaacttgcaggattcttttcacttcacagtgtgggttctgaggatcaaattcagttcatcttcctggccttgtcctaggtatttttttaactggtgaaattgacacctaacaataaccatctcagaagactttgacagtcagttctggctaagcattctttattctcaggaatgggattttcttgaggatctgttcttccttggggaatcttgattgctgtgcttcttgactcctaatgtaagactgaatgattaccttactgaatccaagctaaggaggacttcttgtggcctgctttaatgaaggcttcttgtcttcctttaggtagagatttctttgtccttatttctaagattttgtatcttgctgcctgaggtcagcaagggttattgcctctctttttggtcagagaataattctggtgatgctttgggcctttgtaaaaaattcacttatttatttttatgtgatggatgttttctcatgtctttctgtctgtgcaccatgtccatgcctgctgctgagggagatcagaagaggttgttagatcctatggaatgggagatacaaacaattttgagctaccatgtgggtgttgggaattgaaccccaatcttttagaatagtagtaagcgctggtatcactgagccatgtcgccagcactttgggccttgtatgggatggaaatgtttttcattcttccagaactaataccaagtgaaactctaattttactcttacttttttcttgcacattctcaagggaagataacaaaaatgcaactgaggaggtactgtgtttgtatttcccagggactttgtctccaaccgtgatgttcagtcaacctttattttttagctgaattgttcttacgtaacttatgtggtatttggtatcccttcctctgcaatcttgtaatcatctctccttgaagatacctgatttttcttagatgatagagtacttttttgttatcttcttgttatctcatatttctagtagtgtcaagaaaaaattgtgatagttcattagctgttaattttagtctactctctaactttgtgcttcacatccagaagtctacactccctttcttctattttttagccttcaaaaatctctcctatacttttgttttcttgggaactgtggttgatttccttggtggtttttcaatccctggttcttgcttctagaatttaagagttaagaaaactgtaaactttacgttaatactctgttccaaattaaaaaaaaaaaatagtttcctgttccttgtacttttaactgacagatatgagttatgaaggtggaaagtgtaaaaccctccccaattctttactagtaattaaaatgattcttaaccaactaatgaagaatgggaagtttaaaattgtgatatcctactaaagaatatgaaaaaaaatggttcaatgtcctcagatataaagaaatgagacactgagttcaggtaaattgttcatgtggtgtgttttagctgaaaattactacagaaatttgtattatgactgccattgcaaggcagaaaatcaaagtgaaatgcatatgcgttctcccccactaaaaacataaaacctggtcaaggtagacctatttactttcatgaagttcaaagacgacaacaaaaatacatgttaggtaacaagttctaacaaagcaattggaatggttgtctcattgactcaagtacctggaagattttccaaatgctaacattttattattattttgctctattttattttgatcttggagtatactacttcaaaaattgattgtaatatttgtgattcttctctcattaaggctgtttatatcactggaaaagaagttttcagcttaaaaatgatttcttacatggatgccactgctggatctgcatacacagatatgaatgtggttgatgttcgagttaatttaactgttggttgcattcaagtagtgtttgtcacaaaattcctatattctatattggtaagtattttaataaattatttttaattctaggtataaattgctgttaagcatagagaccctatctcaaaaaattatacatgtatgaaaatttcagactataatatctatttaaaaacaaaacaaaacaaagcatggtctctgaacatgaaaatggctgacctggaacttgtaagtagatcaggctggcctggaacttacagagacccacctgcctcttcctcccaagtggtgggattaaatgtatgtttaaccatgcctggcctaataaaaatacattttacaaattaaaggatacttattcatctttgctttttattgcataaaattgattcttagacaaattataatatatcttcaggctaaaaatcacattaggttaaaagaagtgcaaatagaatagatgtcaagctggttttccagcccactttggtggcatgagagaaaatggccctcatagacagtagcactatcaggaggtatggccttgttggaggaagtgtgtcactgtggaggtgggctttgaggtcttttatgctcaagctatacacagtatagcacacagttcacctcattttgcctgggaatcaagatgtagaactctcagctccttctccagcttgtctgcctacatgccaccatgaggataatggactaaacctctgaaattgtacaccatcctgaattaatattttctttataagagttgctgtggtcatggtgtctcttcacagcaatagaaaccctaagacacacacacacatttaaaataatttgttgagtaccattacaaccaaaatgtttactaccttgtttgtataacattttgacaaatattttagttaattgaaaaaaacattcttggggctctagatatggctcagtggttaagagcactgactgtttttccaaaggtcctgagttccattgccagcaaccacatggtggctcacaaccatccataatgaggccctcttctggcctcatttgtcatttgtgcagtcagaatgctgtatacacagtaaataaatcttttttaaaaaagaaagaaaattctttacatgttaacatgttaatatatagtgtactacataaaatatatgagtatattatatatgttatatggtgtgcattgattgaatttcttattgtttaaaatcatttgcatttgggctggaaagatggctcagaggttaagagcactgactgctcttccagaggtcctgagttaaattcccagcaaccacatggtggctcacaaccatcccttatgagatctggtgccctcttctggtgtgcagatatacatggaagcagaatgttgtatacgtaataaataaataaaatctttaaaaaaaatcatttgcattttccatcttccaacacaaaatatttactaaatacagatgaagtcaccaataagaaaagtatgcttttggttctaatataattctatagataaaattgactttaagaaattagattgaatcttgaaatgtctttgcccaagtttttttcctttcctactgtacccttgctgtcagctatttaatttgtctggtatcatactgatctgtagtctctgttgttgttgttgttgtttgtgtgtgtgtgtgtgtgtgtgtgtgtgtgtgtgtgtgtgtgcgtgcttctgttgctctctactttatatattgggacagagtctcattcagcttgcatatttggctagctctgcctactctaagcataccctacccactcttcctgactgttgagataagggagcaccataccttcctggctttctcagtggggagctaaggatccagcctccatcctcacagctatgctacctgtgttttaccttctagaacatctcctagtcctgtctgttttgtggcatcactaatcttccatagtactgtttctgatgtatgaactctataatcaaatctaaaacagtagcataggccaagtatggagttattttaaaagaaagaagggactcatgtatttatttgacagtgaggagccctcttttattacttaggaatttagaactctgtctaacttgatgtgacctttgaaaccgaagtttccatgaattttcccccagaagttttttgtacagcaaaagcaaagatgaacactttttaaaaatgttttgagaatttcataattgagtgctatatttacataatttttatccctccatctctcctctccaactcctccacactccctttctatttcatgacctcttctttataattgctactgaagtgtgtgtgcgtatatttctgtatctgtttgtatctaaagaaaacagattcttctctcttagcagccaacaattgtagctcttcgtctagaagtagggctttgtcacaatcccctatccacactagcatgtcaactggagctcttcattatgcaggtcttgtataggtaattatattgtagagatatcatggatgcagcttctttgtcatctatagaagacaacatttaacagcaaatgtcctggtcctctatctcttagaatctttccaccccctcttgtacaatgttccctgacacttgggtgtaggagtttgcattatagatgtaccaactgaggttggatcccacaccaacccttcaactctgcactttggctagttgtggatctctataatagtccccttgtattgcaaaaaagaagcttcttgatgagaagtgagagataatgctatttgtgggtataaggcaggtatttaaaatatagttagaaattgcattgatttgataaattggaggggctggggtgattgatcagcaattaacatcacagactgttctttcaagggaccaagatttggttcccagcacccacacagtagttaatatctctaactcaaatatctggggatcagacattctattctggcctttacagacactgtttgctcttggtacacacacatacatgcaagaaaacatctatacatataaaataagttttaggtttttgtttgtttggttggttttaagaaaattacaatagtaggttttcttggtgggtctatgacttctcaaatttatgactagaaacacagtattaggtattcccttcacttgggtgggctttaatcttgagtgcaactaacagctgtgtagttggattacggcctgtcaataggaggcaatctgtgcctaatattgtggttttggctcatagactttgccattggttaggacgattgattgctttttctctttaggcgtcttgcatagcaccttctaattctatgagagcaaatcctgagagcagaggcatatagatcagtttccgcttgatttcttcaagtcttaagtctgaaatgtatgatttcttccacaatagagtcctactgtcttcaagttctgagaggcaaccaaaggcaatagcaataacatatttgttctgggagtttctcagactctctgtgaccagcaaccctgaggaaagtttactgtgcctggcactggattttttgttaaataagccatagctcttggagaaggcattatcatgtcttgtggtatgattccattttagttagatacacatacacttaaaaggcttatcaaataatgtttccctatgactttaaaaatcatcattagtattatttagctcttcttccttcctttctctccttctgtaatgtcctccttctcctattcacttaaacacccaccatcaataatttcccttccctttcataatatatatattgcactgtcttccttcttcctggtccagtctctttatacttctggcttctgaagttacttgcttttatgtcattaaatctaaagattcagagataggattgacaaatacaagagaacatggagtgtctttatgtgtctgtgttacttcactcagtataatattttcaagtgccacacatttagttgtaaatttcatttttttacaattgagtataattctattgtatatatttaccacatgttcattatccattcatcaataaaggaccttaaggttggttccatatccttgcccttgtctatagggtggtagtgaacaaggctgagaaattataactatagtaggatatggagacccctctttttccccttttccctcttcagatcccatatgcccagctattcctctctctatttctccccctacccattcagtgctactattatactttcctagtttctgcagtatatgctttactttcctggtttctccaggatttgtatttatatctgaagatttagagctaggagcctcagatgagaagagaacatgcagtgtctgtctttctgagtctgggttacctcactcagtgttatcttttctggttctatcaatttacctgtgtatttcatgatttcattattcttgatagctgaatagtattccatagtatatatgtaccacattttcattatccattcagcaagttgaaggacatttaagttgtttccattttctagctattatcaatagagtgcaatgaacatgacaagtatttgtggagtaggatatcatacatatatgtcaaggagtggtgtagctgagttttttttttttttttagtctttttgagaattttccacaccaatttccaaagtggctgtaccagtttgcagtcccaacaacaataaataagggccccttccccctcatccttaccagcatttgttttcagttgtttccttaatcatatcctttctgactggtgaagtagatggaatctacatttccttagttgctggggtcattgaaccctttctaagatttttttttttttttttggctattttcatttcttttgagaactctgtttagagctctactcagatttgtttgtttgtttgtttgttggttggttttttttaaattgggtctttgagttgttattagcttttttgttttgtttgagttcttggtatactctggatagtaatcctttattggatgtataactggcgaagattcacattctgtgggtttcagctttactcagttgcttgtttcctttgctatacaatttttagtttttggtcccagcttaattttaggtctcagttgtcagcttttggccacctttccagaccatttcttatccatgaagctcctggagactgaacttggatttttacattggtagcaggtcacttctacacagtgaaccattgcaccagtcctgacagttcttaaatattttatgatttttttaaatccatactgtaaactataagaagttcttaggtcttaaacatttaagtatcatttttgctttgttataatgaccagatttttttatcattgtgtcatgtgttattttccagcagaaaataataagtatataatgggctttgttgtaagaagtaaaagttttactttatggagctaaaattagttaattaatataatttgtaagtaatacatttaatgttttattaaatgtgatattatgtcatttttatcatctttataggcttttatagataattttcaagaagttaaaaatgccttggctgaagcaactgctcaagcagcaggaatggctgctgatggcgtaatggaactggctagaagaagttctaggtttgcactggatgttaacatcaaagctcctgttgtggtcatcccacagtctccattgtctcataatgtttttgttgctgattttggattaattacaatgaaaaatacatttgttactataacagaaacccagagtaatctcccacctgtaattgatttgataacaataaagttaagtgaaatgagactatacaggtaagcttttcagaatgtatttgtgtaaaataatctattaattcttagactaaagacttgatatctttagaattctccttatagtgtgattttattttactattactgtacttttttttttcaaagtgtcttctagctatatcacttactgtcttttaaaaaacaacctagaaatatttgaaaactgttcctttggtaatgatgaatactataaacttatctgaaggaatttattttcatgcttttgtaattctttataagaatgaagaagaaatggggaaatttgacatgaaattcatattcactttgcaacacatagttttgcttaatctattctgtcaacattgaatatttttaagcaactattctgagaaatagttgacttataaaacatttgtacttaacagcaaaagttgttcagagtatttagtccctttttagtcattaatgttcatgatattctcccatttcttttcttgttatatccttttgctcatcagaatcagtatattaattttatgatttcaaggttcccgctttttacttcattgttttttcttttaattatgttttatttactatttttccatttgtaaactttaggttcagtttttctctttgtctgattttctttatatggtaactaagattattttattttgttttcaatctaaatcaaacttccataaatttagttcctccccagcattgttggttcctttggattctcatggaattccctggctttgtcttggtttaactctctttttactgttggtctgtaagtcatctgaaagcaatagtaaattgaaacaagtcataggagtagcaccacccacacttccccacccccaaccttcagtggttttccccctcttttggaaggcatttaccacaggaatgtgagttcatctccatggttttggataagagactgcttcagttgaatatttaagcatttctttcaattcttaatgtgtatgaagggataggaccaagtataattgtgaaaaaaagtctttataagggatcagtaagtagtgcctacttgattggaatgttgtagtacatactattttagagtgctgggaaagctggttaaaaggagacaaaactgaaagtcacacacctaggtgtcttgtctagtgagatggaacatttcattgtgataggtaattatttttctcttcacacaaacaagttgtcaatgtctcctatttaataaagaacgatacattaaagttaatcatacatctggtttcctgcctgaatgcatacaaagcaatttaaaacaatttatatttcctaataggtctcagtttatgaatgatggataccaggaagtgctggacctgctactacctttgaacctggaagtgattgttgaacgaaatttatcatgggagtggtacaaggaagttccttgttttaatgtaaaagcccatctaaaacccatggaggtaatgttttcatggattttgatttctctgttacagttgacagtattatcttagcaacataaaatttcttggctagaatttaggaataatcaggttggtcagaattttaatagtagcttgtacactagaattcatttaatgttctccattcattctctgtcagatatttaagtgactgatatgtgctaacatttatgctagatgttaaagatacatacagtgacagaaaagctgtgatgtctctgtcttcagtctttaccaccatgaacaggcttcatggtgaaggtagtctgtaatatgtaatatatagcaaggaagtaaagaaggtttagggaaacaatgcagtgagtgaagcacttgtggtataactgtaagaaaagttttgttccctagactcagtgtaaaaagaagctgaacaagtactgtggtcacctgtaatatcagcactgagcaggtagagaccagactattggagagcaaattatctgattggcaagttctaggttcaattaagataaccttacctcagtaaataaagaggaaagctgtagttggtaatttttactctttggctcattgctcttcttattggctcctggtgtcttctctcctcctccttctcttgctccttgatcttttcctcccagatttctcctcctatttattctctctgcctgccagccccacttatcctttctccttcctagctattggccattcagctctttattagactaatgcggtgttttacacaggcagagtaacatagcttcacagagttaaacaaatacaacaaaaaagaattcatcatatctttctatcattaaagaaatattccacagaattaaactgttaggataagtctttactccatctgccaaagcccgccaccacatgggctcccagaataacatacacagtcttacatttgtttacaatgctattggccaaaatgactaggatttcttaaatgctagctcagtcttaagtatcaaccataaagacttatcagatgccaggtgcaggcatcttctcttgccaggatcacatggcggctccagagcagacagcagaaggaagagaaaagggaacgacttctttcttacccttgcttatatatgagtcggcctgctatgtcacttcctgcctgtatcacaagacttccttttactacatttcccagaatcctccttgacttctagtcccacctatcttgctttcctattggccaacagtacttcattcaacaaccctatacatatacagagaaggacctcccccatcaataaacaaatgaaacacatcttcaattaatattccacaacaaagagcaattgagaatacacctaactttggacctttatatatacatgtgcacttgtgcttacatacacatgtataccaaacatgtacaaaaaaacagatatttaactaaaataattataacttgtaataaattacatgaaggaaatatattctagttgatatatatgtcagtcaagaatttattgaaaagtatgcttgcaacataagctgaggaatcatgagtgatatttcacactattgtaatgtatggaatgacttagcaaaggaagagaaagttctagaataaagaagttgaatgtagatcacctcacacatcacttttcttccaagttggttgacattgcttcactcttatagaacagcttacatttgtatttttccctgtcgaacagatggaaatcaaaactattacaagttttactgaaatgatagcaatatacagtctagaatgtttaaaaaaccttaagtttactctgctccttgaagctacaaattcactctctgtttagtttttattcagaaaaacattttagaaattttagacttttaagtcaaaattatattcagatcttaaaacatgctaactcaaaatctttaagatcttagcagtaatgagagctttaacttgagtggttgaagagaaaagtttttaaggtaaatacctataagtctctatgctggtaagacatcagaagtttataagtaacatcttccacttaccagtgggagaaatctatgctctttgatcagttatacgcagatttttgtgtggcagtaggattgctgatgtcctttactctctccctggaagaatccacataaaatgttgaggtgatgctacatcctgcctgttaacaactggcagtcttctggaagagactgatgaggaagatgcgtcttccctctgccctaattcaccaattcatttagccgctgttgtcctacactccagaatagataaatataaatcactaccccgtggatcttgaatgtcataaagagcatagaattgaatttgttaatctaattcatacataccaattacttcaatttgtgagtgttcagcttgtggtattttttagcgttgtatttatagcttactctcacatgtaggagcctaggtgatcatcagtcctatggttcttacagtcttttcaacatatctagctggttgcttcataggactatagaatgatgatggtactatttaagagatgtagtttgtgattgtactagttgttattcttgttttataataaccacaaattaagtgttgtactagaaaaaaaggagtgcaagtttgcaagcatgggctgtataaataggtatatgtggactttttgaaaagtagattatatctttgaagttcaaaggtcaagtgcaaataacagttaaatttcatgagattaaaattaccccatttgaaagtagaaattaaacatttggcagcttaacaagtgaacaaaaattagttaagaaataattgaattgagttcagatccctagaattcatgctaaaaaaatgtttgtaatttcagctccaggttccatgagaccttgcctcaaaaacaaacaaacaaaaagtatgatgtgattaaagatacctagtgttaatctctctcaatctctctctctctctctatgtctctgtctctccctccctccctccctcccttcccccctctctctctatatatatattatatgatatatatacacatatgcacctatctatacgcacacacacacgcacacgcacacacacacacacacatacatttatcccattgcacacaaacctatctatctatacacatacacatttatatatatatatacacatttatccccatcacacacatacacaggaatgaaatgctcagttcctttttaccgtgtgctttcatattaatctcaaatctcaagagaagctgaaacaaaacaaaagtatgtgagtgaaaaggtagtgtttgatataaggtattaatgtatagattatgaagttcaaaattggcaagataagtctctaggacatttaaacagaggaagtaggtattgcagtctgttagcagaatttttgcttgggagaggtcaggtttttttctaagtaaatgccttcatatggtgttttgagtaagaatggcccccaaagtctggtatatgtgaatgcttagtcaccaggggtatagaattctttgataggattagaagaattaggaggtgtggccttgttggaggacatatgtccctggggatgggccttgagttttcaaaagcccattccagatagtatctctcttggcctatggatcaggatgtagttcttagctagtgctccagctgcatgcttgcctccatgtctcccaccatgatgataacggactaaacctctaaaaccgtaagcaagccacaattaagttatttcttttgcccatggtgtcttcacagcaatagaacccgtgactaaggcacttcacttcagtagattagatgaggcctattcatactgtgaagggcaattgagtttgctcactcttttttgtactaaacattaacccaaccttaaaaaaataactttaatagaaacattttaagtaatgtttgacaaaacaaagccaccatgacacagttatccctcataccgcttaagataggtgtttgttgttgttttcatgctatgttcaaagcaaaaaagttaacgtgttgaattagtttttagtcatttatacaggtaagtattttatccatatagccatagctttttataaaatcagaattgcttctttatatatggaacttttgtgaagaacaaataaaataatttatataaatcctattgtaaactatatttttcattacacaaatatattttattctgtatttcaaatgtgccttctgattaaaatcaaagtctaaatagttagatgacttcacaaaaacaaaagctcattttaaaactttaaactgactgaattacatacatagtacatccatattagttcattataggaattgacattaatctatattttataaactactagttatcacttgggctgcagatgactgaatattcagtcagtaaaaatatttacagccttaaaatttggtttatagaaaaccaaatgcaggatataggactttaaagaaaacaaatcttgggggctagagacatatctcaatcttatgcacatttcacacttccagaggacctggaaattcctatcacccacatggcagattataactgattgtaactctagttcccaggaatacagtgtcatcttctaccctatgctggaaccaggcatgtgtgtaatgcacagactaaacagtcacacacacgaaataagttttttttaaaccaatccttcttttaggtgtgtaatttctttttgtaaaatcttacttcgtttttttaacagttcattcttagtcaagaagatttaacgacaatttttcaaacattgtatggcaatatatggtatgaacgagatgtttatgtccaatctaatgtaaataaagaccaggagatcgtgactggtggaacaaccggtgtttcctaccatttgggaggtttgtgtttaaactgcatttctctctggcttcgttctcctttctctcttgcctgtctgtcccccaactttgttttctctagttcttgataaaagaggacttaataattctctaattaacaaggctcacttaggcaattttaaatgatctgtttttgttactctgctgattttgcatgtatgtatttatgtgtatattgaattgaagttcttagtccgattgtgataaaaattcttaggattcttgtttatcttctctatatgtccttattttctgttttgcagcatatataatagatgacttatctattgatgttttaggaatatcagaatactagaagtaaaacaattgggtaatccttgtagatgatgaattttaacaaaagttggagggttggatggaagaaaaataataaagtaaatcataataggaaagaaacttgttttcgtgttggtggcaaggtgctatttgaatgtggctggttctaatgcagcactagcacatggagagtgggcttagtgagggtgctaagctgattttgaggctcataaataaaattatatcctcattttaatttttataggtgatcccaaatttgccactcttaaagtgaaatctgataatccacaatgcctgcttctccaaagccctgaaatatttcacagctatactactcagaatcctacacaaaagtcaatataatatgaaaccccatcctcacttggtagggtaatcaaccccatcttttattaaatgtgagtggttcaaaatgaagtaaaccaatagaacacaggcatgaaagaaacaaaacacatattattagtgaaaatgaggtgatacactgaatgcaaataaaagcagtccaacaaataaaacatattttacaagaatttgctaagaaatgaaaatagtaactaaatggatcctgctattactgtcaatcttcccctttcaaaggtagaggaaaaaaaatcaaaggtagaaaaagagttcttggaaactaaaagtataaagtacatgattactgatttttaaaaaataataacactatagtgttagaatttaagtattccagaatatgacctgagataatagcctatagtataaagaaagaaaacaatagggatggaaaatgagattaaattaagagtgctgtttcagtttagaagttccagtcccagtatgctcggttttaatgatagaaataattgagcaaatggaagaaaaactggaaagaaataactaggttcaaccctccagatttatgaagctcgttctcagctatagagcacacacagtttcaagcaaattgaataaactaagacgtatgtaaaaacaaattcctgaaacattagacctaaaacagatagatattttttaaattaaagaaaaaaaaaaaacaggctgcctattacagacttataaagaactacaaggataattgtttttgttgttataaaagacagtggaacagtatttcaaattctaaatgtgattttgaagctaggattgtatacatggtaaaatatcactcccaaatgtgaaaacaaaataatttttagtaactcatagtttactcaaaccttttcagatcctctcctaaagaaattattctaaaaatatactccagcaagataatttaagaatcagaaaagaagaaactatgatatcaaacaacagtagtaccccaaaagtacacttcctagggatcccaaaattgtccgaatgattaggctagaaagtcagtttctttgaaaaggaattcacaatgctttatggcttcagtagtacgaggttgggttacacatttgcctcactgagaatgcatgggtgggatataagtgaaattaaaagatccccggaagctcaggcccccaggatcttttcccaggactgcggccaccccagtcaccaggcagaggcggaaacttgatgcaaacagcaagaggctttaatgaaaggtgaacgtttgtacaaatgggcctcctcagtatgcaggctagagaacagctccgtcccccaggcacaggcgtttttaaaggcaaaaaccataagcttagggaggagccgagactctctgtcacttgaataagtgaccagagtcctgggttgctaggaggcccttagtcttgaggggagggctgggaatcagatggcctcctgacccaccagttataaaacccacatacctcaggatgtgctaactaatcttgcctgagcaaatggtagctatctctttgtttcatagggaccctaattgttaactattgagacgttggccagtggggcaatctgtttccttcatgagtccctggaggagggtggctatctgagaattcttggtacccagctatcttatggcctgtaagggagtaattgctggccgctggtaaattccaggcactaagtcatagtaaaggccttggtcagtttctgggtcaggccactctacattccgtttgggaagtttccttatctgggctatatttctttgctaatttttaagtctttgaaaataatgtctccagaaaaagacttggagtgttgctcagtgattgagtgcatatgtaacatacacaagaccctggctttgatccctaaaatgaaaacagagaattgggggggggagcatagatttcataaaatatgtataaaaaagcaactacatatgtacatgatattgtaaaatagcttctgattttaaatatcttctgtaatgtggtatagaactgaaatacactaaagtttacatgatttaatattaaattattcacatgcaaaataagagaacatgtttgtattggagagataccttagtgaagttagcagaggcagtagtataatgaattgcaacatgaagaagtgtaaatacttgattgaaaactgtagtcagcacatgaagaactatgcatgataaactctttgtagatgacctcctctggaccaactcctgtttactagagctgtttttttctccctgtctattgtttgtcacacaagaatgtggggaatgacagagaaagactgagtaaatttgaataaataagaaaataaaaatcactatagatcaaacaggtgaagaaaatgacagaatttttttaatagtttttaagggtccacaaggtgttagatcccaggaaaactcagtcccccagggtcccagccaggacggccatcaccccaaacaccaggcaaattcaaaaacttgctgcaaactgcatgaggctttattgttgtttaactgttagctcaggtctttcacccacccgccatggctgatggctaacaaagacagcttgaaccagctgccaagagatcttgtagggcagcataagggactccccttatgcgtttaggggtacgcacaggctcaggattggtgtgcctccaggcttagagggcttgccctgtgttgattggccaattggttgttatggcccacaggccctcccagggtggttgctatgttctgcgagtcattgctgtgcgcttgtcattaaagcacacccagagccgtaaagcatagcgctgccagctaacttatgattggttccttgccatgaggcgggcatctgacttctagtgactagtacaaggtcatggcaagcacgtgttactgtcatggctgccgaaatggggagctggtcccttcaaaggtggtctagtggatagatgcttgccaagcaagcctggaaacctcagttgacccaaattcagtgtccagaaaccaacatgtacacatacacacaagaatgtcaaaaccgtagtttttttttttttttttttttcttttttgaaagtctggtaaaattaatagtctctcaagcaagactagtcaaatgagagagaacacaaattcttagatttttattcattttacatggcatccacagttccccctccctcttctcctccaactccccttccacacacccctacccactcctcagaaagggtaagtcctcccatggggagtcaacaaagcttggcccattaagttgaggcaggaacaatctcctccctactgcatcaaggctgatcaaggcattccaccatagagaatggattctaaaaccagagagcacaaattctgaatatcagttttcagtagaaaagtacagaccacaagcaggagaatgagtaaatatgactagtgatgtgaataactttatgaaacatacatgaaatgtagaaatgaaaagggctggagagatggctaagttggctaagaacaatggctcctcttccagaggatccaagttcagtttccagaacccacatgacactcacaattctgtaactccagatccagggaaactaacttcccttcttgcttccatgtgcacatgtatattgtacacagacatacaggcacaacactcatacacatacaattaagaagatcttttaaagtatttcattacatatttcactttatgtaagtttgtctcagtaaatataaattacctgacatggtggtacttttgtctggagttaggttaaatatgaattgttgtgtttgtattataaacccaattaatatatgcatgtatatatattttctgtttaaaattggagtatgtagaaaataaaaattttgaataccaattagaacaagttttaaaaatgacaactaaaatacattgtcttagtttctttaaagaaaaaatttgaatataaactgttagatgctgtgtgtgtgggtactactcattttatacattagttaaactctaaaatgaagcccttgttcatgattccaatattttgaaagttggatgtcaggagccaagaaaattctttagagaatttccagcagttccagtaattggagctctggtctgcattgaattggggatgctagctgatttgctattgaatagcatggccacagtggggaatgttccctagtttgcatctctacagaactaagcatttgaataggcctgcaccagagttaggagctatctaggaggcaaaggggtggccaggggcttggtggcttcagggtcagggaagcatggttaggaaacagcctggaaaatgctgaataaaagaaagactccagttttgcagcatggaactgagagctctctaaagatgacaagatgcctatgtttggtctttattgccgctgggttactagaaattccccaagtccacggtcctccactcaggctgaacctcgtagcttggggctgagacctgctggtccatgacagttggactgcagtatccaagaggaaacagaagctctgagtatttagttcttttctctccagttatgaaagaatgttaatccagactttcatgtctaaattttctaaccttttgaattttcttgattaccatttgactgtactcatgtaattaataatttggtatatctcatggatgctttaattacctgcttttataattgttttctcttattcctcacttttaattctgtagcatctactgtggtgacagctgctgtggtggaggtacacccacaggcatctccagttaacacgacactaaatctgagtttcaaaactgattatctcaccatggcactttacagtccagggcctgaacaggtaagatgaagaagaaaaactctacatttgtaaagaaattaagtaaataaagtatatataactattaaataatagttttaatatcttgtgtatattttatcgtgtatgttctgaaaaaatactgatatttttagtagttatttcatgcattttcatttttaaatgagttatctttcatatagcaaaatcagaaaaacaaaatttgaaaatagtacttatatttttttggccttttcttcagataaccctttgaaaacagagaattttgggcttacagtattgaacagtaaagtcccggttagcatgctgaaggccatgcacagggttcacagtctagcatctagaaaagaataaaaagagaagggccaggtatcatggcacacactcttaatctcagcacttgggtgggaaaagcatacaggtctgtaagaattcaagggtagcatggactataaagaaagttctaggacattcagggctatacaggtgaccctctcgcagcaaccaaaaaataaatacataaaaattaaaagagaaacagaatagagattttgatgtttcataagccaatgtcataacttggagatagtcatatcacaaagtatactttaatactatgcttctgtgtaatttttatgtgaatttcttttccctaggccttctttacagatgttcgtgatccttctctggaacttgctgaatttaaattggagaatattataagtagtttaaaaatgtatacagatggctctacattctcttctttctcattaaaaaactgtgttttagatgataaaaggcctcatgtcatgaaagccactcctaggtttgtattatcctaattttgagctattgaggaaagattgcttcattcttatagaacttatactcaaaattgcctttatgtgtattcatgaggggtcttgagaacttcagtttaatacatcatggtttctgttcatgtttgaagtgttgatggatttattgaatacatagaaataaatagtgcagttagatgggaaatgtatgaaatcaagaagaaaatataagctgatgaactcttataatttcttagacacagatttttttccccattgtgaaacaactatatgccagaagttttataagttcattattcccaagagacatgctctcagaatatttgtttgctgtcagtaaaaggatagacaggtctttaagctttattggtatgtttggttattttcaagtgacccatacatacaaattgtcattgtatttttcagaatgataggactgacacttgggtttgacaaaaaggacatggtggatgtaaagtatagaaaaatcagagatacttgtgtgactgatgcagttgtccaagagatgtatgtttgtgcaagtgtggagtttctgatgactgttgcacgtgtcttttttgatgcctacatgactggttcggaattagaaaccaatgttcaaacatggactactaaagaaggttagttaccaaataaatattttaatgtctgtattgttgcaactgtatttgtcccggttagtcttttccatgctcacagtaaacacattaataagttaaaagtccatatgtatgtatgtaaataataaaaattaataataaataagttaaaagtgtacacatacacacttcttttttatttttattttttatttattggattttccaagacagggttgctctgtgtggccttggctatcctggaaatctctctaaagactaggttgtcaagaaattcacctgcctctgctattggagtgctaggattagagacattcatcaccaccacctggctgctagcagttcatagtgtttttaatttgtatttttgaggcagggtctcatgtagttcttgatctcctaaaactcacttgtgaagcagaggaactcctcatcctcctgtctgtttcctcctcactgctgggatgagcaacatgtgtcactctgttggccttcattgtttgaaagtgtgcgtatgcgatttgaaattataagacttgagtaagtaattgttctcagcagttgagtgacaagctggagagataatgaaccagacgttcttcatgttaaacatggtcttttaatttaaaatactcattaacttttatattcacttctagattttagtatatagttttcctgagttttttttttacatattaattataatatagttgaaagagtgttcagagttggaaattgatttagagacttttccccagactaattcatgtttctataagtaaatggaggtttgatggtggagcatgtgcatagcatatacaaggtagctagttctgtttctatccctgtgtgacagtgggcgatattgcctatctcaaaagaaaaacataataaatgcctttgggatagatgattttttttattgtatatttgactttgtttgttttgttttgtttttttgagacagggttactctgtgtagctttggagcctatcctggcactcgatctgtagaccacctggcctcgttctcacagagatccgccttcctctgtcacccgggtgctgggattaaaggcgtgtgccaccaacgcctgacctatatttgactttgaatgaagtaacttaactgttcctcttcactcttcataagtaatgagtgtattatgtatgtgtttatttctattttagcacctgtacagggttcagagacgtacgaaataaatattcttataaaaaaccctgagattgtgtttgtggctgatatgacaagaaatgatgctcctgccttagtcattacaacacagtgtgaaatttgctataaaagtgacactgacaacaatacaatgactgctgccattaaagatctccaagtccaagcatgcccatttcttccagtcaagagaaaggacaaaatcaccactgtgagttcattgcctaattcaattgcaagttatttgggggttattgtaacctcttcaggaagcaactaccttcttcccagttttgttcatgatagctgtagctttctttcttaatggagggcagaagttaagagtactgtttcattttcccatatagtcttcatttagaggaatggtctaaggagttaacgtcatctttatacttttaaataacattttattttgaggttctaaatatgttagtatgaagatgctgtttgacctttaagttaaaccttttagttttagtttttattgtttcagttttattattttaatttggggatgggttttttttcctcaaataatgtgtttttacttataacttacttcatctttccaccatttacttttacatacttgatatttgaattttactctctaatgagttgtttggttttccagtgttggaaatgaaattcaagtactaggcaagtattcttctactgatctgtttctacagactgtgaattttattctctttgtcttcaaaactcttcaaatactcaataattttaaatatacccatgcagtgtttaggctgctaaaggaagaaggaaagcataaatattactaatattatcaaccaaaaataaaaaaaaacttattgtaggaggatcttatcacatagcccagggtggttttgatcttacaggtctcctgctttagcttcctaagtgctggaattgcttaaatgttctgccatacccagttaattttaagtcaatgtctatttaacagattagaagtttgagtctagatttgaatgtttggaagataatttacagtacagggctgacagattacataggtccatacggtcgattgctgaggactcaaaatcagcaaatcatgacctggaatctagactccaatacctagaaggcagtttccatgccatccagatgctgtctaaggatgatcatatgaaagacctaaaaaaacgtgtagatgagcagttagagcaatttacagattcactaacgtgcttggaatcttttatgattaaagagattaaaacttttcaaaaggatatcattgctaggcttaaagatcagtgggatgcctcagaagcagaatcactccaatcccaggcacctactccacccaggtatcgtgactgttcttctaaggttgttactcgtacaccattagtgtacccagctaccatggtagaaaagccagcttctaagaaacaccctcatggacaaatggtttataaatggcaacctatacagccaaaggatcttaagaatattaaagaatcagttgtctcatatggtctccatagcccatacgtaaaacagctattacattcatggacaacctttaacaggatgacacccacagattgggaacgattggtaacagctgtacttgagaattcatgccaaatccagtggaaggcattggtaagggaagaggcaaagctccttaaacgtcagggcataaaggaaggttttaaagcgcctctagataagcttcttggtcagggtatttatgctgacccacaggttcaggctaaatatgatgacgatatactgtctctttacaggaaagcagcattaaatgcctgggataaggttcatgagccaggagaacatctagaagcttataccagaatagaacagggacctacagaacagttccaggacttcttacaaaggttaactagggcagtagaattacaggtaacagatccagaaacaagacaatcaattatatatacaatagcttataaaaatacaaaccctatatgcaaaagaatacttttgcctttaaagatcagatcagctccgttagaagaatgggttttgtatgcagccaacattgactataatgtgcaagatactggagcttgggtaggagaagccatctccaaaggtttaaaacggcaacaggaaattaaaagttctagaggtgaggatgtaagggcttggcaaggagaagcaccttacagaggtcaacataggtaccaagaggctagaggttactactactatgaaccagaaccttggggaggaagagccttccccttgatcccacttttgacaccagatatagtaagaaattaccaatacggagtcaggtaaaaatataagggtatttaataaggaaaagccttacttacagagcgaaccagccagccggtagtagtctgtacaacaaaaaaacaaagagaaaccaaaaccgaaaacacagtccccctactcactctgaccacgccctcacaagccctcaggtactcttgtagccagcccctaagaaggcgtggctacagcttcccctacagactgttgttatagttctcagtcatcactaagaaaaaaggaaaaacagaaagtggagtccatattcaattctcattaaattatggcataatcttctattcaccatgccctttttgcatggatatagctgtataatcttaaaggactaggagttagacagactacctcgtaggaaggcagataggaagagggttcgtgactgagtagccctcaccctcttgacctgagcaaaagcctggcagcaaaaaacatgagccccctgcttatggattgattcagtgagtttaagaccagattggtacatgtttatacaatacctgtggaccaatctagtatctgtgaaaggggaagggcatctacaaatactgtgatccacactgcagctggattctaacattgcattcctactccttgctcatccagtcaataaatgaatcacagataattttgacattacagaagtgtggagcttgagttttaaacattaggatacaaaatagtctgctgttaatcaaaaagcccatcctcccctggtattaaacatgctagagatacacctctttctaggaacatgataatgatgcttactgctgaagcaaaagtcactcttggtagaactttcactaagaacatcccccccccccaacaaaaaaaaacgtatataaagaacatggtataggaaaattcagggagaatgagctccattgcagaaaacttgcaatatatatatatttcacttttaagtataacttgtgacacacttcttgtgtctatagttagggaaattgccaacaagttgcctggtttcttgatgtgaacaacaagatgctgaggggtggggaagatttaaacagaaaaaaaaaaaaaacaagacaatgctttagataattctcagctttttcaagttgcaaaaacatctgaaaatcataaatggatgcacaaagtgtaaggatatagtgtagagaaatgactgtataactgtgcagtcctttgctaaaatataaaatatgaaatgatcaataatgttcagtcacacaaaagttgcctttagaatattagtgtgtgttgttgaaggcaatgtggaaataaaagaaagtggacaggcatcttcaaaaagagttattctttacttcgaactactgaagggctgcagtctctctgagagtagactactgcatgtgtgttgggatgtatattggtaggagggaagcttggatattttgtagggtggtggaatgggtgatttgggctggaagattccatatgcagggcagtttgcctgcatctcaaagtgttagatatcactggagttatcttgatcctattatcagaaatgtcccagaacctaacaacctaacaaccttacctgtcctgaatttcttagtcattaacccttcaaggtgttttgcacacatcctaatgcattcaaaccttcaagaagcgtaaaatgttcccttactcagcttatcatactgtcaaaaagatcagtagaggggactttttaactgacggagtgattcttcatggaatacacataaagcctttaagattcctgtttaaattattttatcagaagcactgccaccttggacagatagatgagggtacaaaatgaagagggactctggaatcttcaggatttcatgggaagtaggctgtagttttgcattacctcttaataaaaggggatagaggataatttagagggaagaacagagatacgaaaaattattcctacgattagaatttgaatcaagaaatgtgtttgacataagagtcactttgaattgaactacttgtaactattgtccctgtatctttccaccattgtttattactaataattaaggcagattacccactcttagtgttacagttccatagagaagttattcccccaaagtcacacctaatgtttgtccaggaattattaaaagataattgagattttgcatttagagtaaaaggaaaggtacagatgaaggtatataatgagatatcattagatctttgaagagatttgggtctttgtgttagaatgagacccttaggaaacttccaacatggtgaaatatcacttggcagagaagtgacaatcaagggtctagtggttacagttctgctttccatcattaggaaaaagttcatttataatctcagaatttcctagtgattatttatacttattatttttcttagtgctttgcagttttagcttttcctataatattggccttttcacacttattttactgtatgtaaaaagtacgatagacttttggtaaaaaaaatgacgtactaagagcttcctatgtttttcaaatatttaagcatattttttaaatgttaaggtaggtttgtgtttgtgtgtgtacatatgtacactccttatctattgacatgtgattacatgtgctgcctagggaccctgccagtaaaaacatgtcagcattaaagctctaaaattcttagagtcaagtgatgtttcatgggaattgtcaatacataaaaaaaaaaaaaaaaaaaaacccacgactctcaaagggaataggagatagtttattgtagagccaaactttctttttatagcaaataatagtgtattgattcacttataagtatgattatttacttttaaatgttattatctattacgaggaaagactttaagtggaaacattttagcttaaatatcagtttaataatattttgtattttataggttttacagccttgtgacttattttatcaggctactcagattggaacagatccacaaatgattgacatatcagtaaaatctcttacactaaaggtaagctaaaaacataaacatttaaaactgatttgatggtagatctgtcttagctgctcaaggggctaaagtataagaatcataagttccaggcctgcctgaagtacagaccactgaggtgtaagccagcctgggcaatttagtaagatcccgtctaaccgttaccattaccaccagaaaaaagactgagctcaatggtaaagcacttctgtaggcattcacagggcccaagttagaatccctgtctcacaaaatgaataattatttggatatatatatatatgaaaagtttctaagatattgttgtaaattttatgatgaatgctatagtttattgacatacgacttttgtagcggatatctaggatatatataattgtagtcatatttagttggttaataaaaacaatatttacaaatactttgacaaatttatctaaaaatttttgtagtaaaaaattatggtaggcaaaaaataaaaaaaaaaaattatctattgtcctgtagtgcttttctagtttggccttaattcttcatgttcattcagcaaatatatgtaatccattttaaaattgttttttctatttaggtttcaccggttatcataaataccataataactattacttctgtgctttatacaactaaagaaaccatcccagaagaaaagacttcttctatagcacatttatgggacaagaaggatactaagaatctgaaaatgtggtttctagaggaatcaaatgaaacagaaaaagtagttcccacaagtgaattgatgccaggaggagagacactgaacttgaatattgattctattttcatagttctcgaagctggaattggtcatagaacagtgccgatgctattggcaaagtcacgccttttgggggaaagcaaaaactggagtactttaataaatctccacattcagcttgagctggaagtaagtgtgtatataatttttcaggtttaagatgcttcacacagaatattctgggatcttatatcactatttaaatttagtttattgtaaatactgatactggctttataccttttagaagaaagcttacacatttatgcccttgagcggttgcttatatattactttaaatttcaaattacatacccatgctttatgtttcagctgatttttacaaacctccaaggtggtacattagggtctagagagacagcctagtatgtatgtgtaacaagaggttctttgtctcgcagatcctgctacccttgagccccacaataaacacacagagacatgtattaattatgaaactgttggctgatgactagggcttcttattgactagctctgtcttaattattaacccatttctataattctaagtatttccatgtggtcttggcttactggagaatgtccagacctgtttctcctcttttggtggctacatggcgactgtgcctacctacctttccaagaattctcctcttctcctagtcttgcctattttcctgcctattggccaacaatgttttattcatcaaccaataagatcatcaaccaataagagaaacatatatacagaaggacatcccccatcatttaggggcttcttgatcttccagaaaccagaatctgttcccagagtccatatcaggcagctcacaactgcctgcaactctgccctatctctctgggaatctaactccctctttggacctctgggcacaggcacacacatgacagacagtcaaacacatatatgcatatataaaattaaaaattctgatttttaagatctaaaattgattttttttcctttggaaaggtagattaaatttatgaatacctgagtaagctctttcaagttttaaagagtctctaatgaggatgttcttgaagtgtatagttgcttagaatgtgtgagacattatactcaaatcccaaactttcccaaaattttaaagaggaaaaaaaagaatcagagtaaacatgttttcctcagaatttataaaattatttccatggatatttcagataaaattaatttaagaaagagactgggaatataggttagtaataggatgtatacctaatgtgtgtatagcactaattttaataccagtactgcagaaacagaagaaagtctatacaatcttctccaatgatacttaaataaaattattgttcttgatattttttgaaaagcaatctggttatctaccttaaaagagtgagagttgatatttaaaagtttctatttttacatgaaatgataaagaattatgtactaacacaattgtaattgattttgactactgcacattttcaaattgtgtttagaattatgtgtattttgtacaggactttatctgaggcatccaagaagtgccaggcattcaaacactaaaattgtgtacaatgtaggaaagctcaccatgataccaccaagtttgatggtgcccgccatcaagggattttagtcactggtagtggattgacaagttttcaagtgtcagtagtatgtgatagatgaatgcaggatttgctgtttggttcaggagaccaaggaaaggtgctttaggaagggttgtagggtctgcaggaaggctcagtggataaagatgctcactaccatgcctgcaaccagagtttaattcccagaacccatatggtagaaaaagaaagaactgactcatacaagtgccctctgattgaaatatgtgtacacatttgtaaacaaatatataaatggaattatactaacatgtgaagaaagaatttgatctctaagccagatgaagaaagtatgtaaggagtacatataaaaaactattaattgacatgaagaatagttattatgcagaagaaatagcacagttaaaaggcatcgtagtaagagcatcatttaaaaagtcattttagatagtaaaatgctttatttaaaaaaaaaaactaaaaattctctttttaggttcactattacaatgaaatatttggtgtttgggaacctttactggaacccttagaaattgatcagactgacgattttagaccatggaatcttggaatcaaggtatgtatgtgtgtattattttcttaaagcagttttaggtttacagaaaaattgatgatgtgtactttctccatatatcctctgcttttgtgtgtgtgtgtgtgtgtgtgtgtgtgtgtgtgtgtgtgtgtgtaactttattattaacatcctcaatcaaagtatatttgaagtgtgaaaaagagtttagaagaaaagctttccagcgttcttaaggatatccatactacattatatacttcaacttatttatttatttgtatgtatgtggctgttttgcctgcatgtatgtctgtacaccatatgcctgcctagtgtccacagaggccagaaaaggacgtcagatcccatggtactggagtcacaagccattgtgagccaccatgtggggcttgatagtcaaactcaggtccattgcaagatagaaagtgctcttaaccactgagtcatggctccaaccccatgtagtaccagaaatgtaaaagtgaaagcaaaaatcgtgacctgagactgaatatcagagatcccattcttaactgttacctcacactatggggatgttcttttaggttcttatgttctgtgaatggactcccctccctctcctcctccctccctccctccctcaactccttcccctcctccctctctccctccctcaactccttcccctcctccctccctccctccctcaactccttcccctcctccctcctccctccccttcctttccttccttccttccctccctccctccctctctcccttcttccttcctttcctgttcttccttccatacctccagtgagtagctgaattctagaaagaagcaaatagtacttattcttaaaaattcctgcttcatagtgttgttctgccacttttattggacttgttagtagctagttctatttctgttaacaatgatcactacactaaactattcttctttactgattgtgaagtgtatacttttgatttacctgcaaattgcctatattcttagtaattttcaaaggttttctttatggaagaggatagaatttcctttcctttagtatttcttcttctcagctttgtgacagtacttggcacatccaagaaatttcattgggcatataacccatggaattcatagctctctacatcaggccatataacccatgggattcatagatctctacatcaggcagtgtaattcatgcaattcattctctctctctctctctctctctctctctctctctctctctctgtgtgtgtgtgtgtgtgtgttgtatgttgtaggggacaatgtagctatggtgtgccctacagagagagagagagagagagagagagagaggagagagagagtgtgtgtgtgtttgtttttactttgcagataagttatactattaaaaacaaattcttttctttcatatctaatttttttcattttagatgaaaaagaaagcaaaagagtccattgttgagtctgatagtgaagaagaaaactacagagtaccagaatataaaactgtcataggtttttattctaaagaccaattaaacattacactatctaaatgtggccttgtgatgttaaataatttagttgaggtaagaaaaaacaaatatttgacactttaaatattgaaatattttacattaacctttatatgagtaaagttgttgttcatctagttacttttttcatatactatagtgttattctcatttactacaaatgttccctgttaggcatttactgaagctgctactggatcttcagctgtcttcctaagggatctagcaccatttatgattttaaattctcttggacttactgtatctgtttcaccaagtgattcttttaatgtactcaatgttcctttggcaaaatcatatgaactgaaggataaagagagtttaagtatggattatgtacgaactaaggacagtgatcatttcagtgcaatgaccagcctaagcagcagactcttcttcattctacttagtaagtgatacatttactttctggggcattgtgaagttgttctgtgaaagcagtcttattaatttgtagtactgtaatagctttaaaaaataataataggttttctagtacaatggggactacattaattattattctgagataaaacgctatgaccaaggcaacttatagaagagtttgtttgacttatagtttcagagggttagaatctatgaatggcagagttgaggaagcagacatggtggtttgaatagcaaggggagtactcacaccttgaactgcaagcaagaagtagagaacaaaatgagaatggtttgagtctttgaaacctcaaagcctatgcccagtgctgcacttcttccaaaaggccacacctccaaatccttcccaaacagctctgccaactggggagcaagtattcaaatgctagaacctatggagggacaatctcttcaagccaacatggtaacaatagtttcctctccagtgtgttaatttctttggttactaagtcttggtattctaatttctgacttcacttatccagagcatggtaatattagaacttggagtaaggatgcaacatactagatcttactcagcttttccttattagtgataggtgtgtcaaatgtttctaccatgtttggtctgactaaatagtgcattttacaaatgtttttaggtgagtgaatttttaaaagtttgaattaatgcagatgttgtatttctctctgattttatgtttgatttattttatgtgtaaaaatgtttgcctttttgaatgttttgcaccacatgctggcttgattccgtggaacttgggttttggatgattgtgagctaccatttcaatgctgggtattgaacccacgttttttgaaagagcaacaagtacttgtaactactgagccatctctctagccccttgtaaattgttctaaatcttaaaagtactgatttggaaatcatttctgctttccacaagtttttcatatttattggaggttaaaaaactataattttttaaatagccataaaatcttgttttcttacccatattcactggtactttagtcagatactgggggcagtgtttgtactgtcagaaaagctaactagacacagaaggctactaatacatttctcatcctgaaataataagtttaacagatgggtgttatcaggacattgtctatgatgtgtacttactacttttactcactgtgaaaattaattttaaaactggggaattaaatttatataaattaatttcactcccaatataatatgttcatgtttgctgagtttatgtgaaattttctttaatcaaatctaagttatatctttaaaatgacatagagagttagaaaattaacagtggaggtctatactcaccttggtatcttctgtgattattatggcagtactaataattactcttgaatattatattcctcccattagtctgttttcttaattttgatggttttaggttatttagactcctaagtgaaaaaactttttcagccatgttttttataaatgctttgaaggatttaggtgaataatatcccataatattgattatattcaaagactttttttgtttagaagacaatcatctagtgcttaacatacgtttgaaattattacatatgaattctaattaactcagcaatgtctatatttgttttagcgcctgttaaccactctgctgctgataagattcctttaacaaaagtgggacggcgtctgtacacagtaagacacagagagtctggagttgaaagatctatcgtttgtcaaattgacatgtttgaaggaagtaagaaagtaacaatccgctccccagtgcaggtatgaagtaaagaaatgggtagaagctctatgcatatgtttgaagcggcccagggatgtagctcggttggttggaatgcctgccttggatgcaggaagctctgacttgatcctccataccacatatatatttagtggcatacctttttaatcttagcactcatgaagtgaaggcaggagggatcattcttgcctgtaccatctgtttaatgccagcctgggatacatgaaaccctactcagaaaaaaaagaaaagagaaacattcaagcaaatcattgccaaaagaatacaaagtgttgcagaaacaaatactctcatcaatagtaactgtactcctgtgacatgagcactagaatctcatcatttcttgtagaactgcttcatacagtgcgtatagtattttataaatatatgcatcgtattttacttagtcttatagcatgtttatatttttagtagtaaaattatcaagaaaattacagacttattgaaatacatacatgtaaataaatagcatgtaaagtttgttttggtataaagatacacttaagaaattttcatagccaccaagatattgaatgtgtttactattcaaaagcttcattctctttttgctttcctttgctgtacattctcttagcccacagtacattagttacacagtcttgtttttcatatagacttaatagagaacagaatttgacttttccattcaatcagcagagtatgtagctacataaggttactgagaagtagatctggtgtatggagaataccacattttcattttgagttagtctttgtgtatgtagaggccagatttgagattcaaagttttccatttggttatccagttgctgcaagccagatgatattttcgccttagattgtcctcattgtccttgtatattggtggcttatttctgaactctctttttgattattctgcgtctaaatcattaatcatggtatccctccttattttttcctgtttgtttttaactgttataagtgtttcattttttaaaaataaaatgattcttcttattaaataactttatttttgattaccattattatcttttagaatacagattattataacattcactatttttcattttattagactcatgtgcttgttctaatagatttcaacaactatacttaaaaaaaaagacattgtactttatatattttagttaattttccttgcaatttttttatctttattgaaaggatataaacaaaattgttaatgtgatgaatgactttggttttcaaacattaagcaacactattcctagtataaatctttgccttaaaattgttaaacttctagaaaactgttagatatgacttaaattatgtttaagatttttgcatttatattcataaaagatcttgatctaaatttttaatgtgtttggggaaagttttaaactatagtttgagttgatctaagaaattggttgttaaggttatactgttccatttaaaagagtacttacactaattctgagcttctttggaaatttttccaattgttgaatttattttttaactatttatggtccccttttttaaaacatgtataaatttataatgagtgtaaatcacttactttatttgaagtaattcagctatttaaaatatttttatatctattgtgaataatataatattcttactagtcctatgagatttatacaatgtatcttgataacattcaatccacattcctcctctcatcgtctccctgatccaccccttctcataatctcccctgtgtctattttttttttttttaagaagagactatcttgaagcaaatgtcctgaacctcttactcttaaaatctttctgcccttttccttctaagtttcctgggccttaggtggacattgtgttataaatgtattaattgggtgcaggaaaacagtataactatctagtcttcagtcctcatcagatacccaagaaggttaaaatattacctgagtaaataggaagtgcaaagcaaacaacttccaaaactgtagaaatgttaaagatagctgtgtgcctcaacagtcacccaaggtttctctccactgttggggcatccatctttggcctacagacctagaatatctgacagacttttctgtgaagcaggaattttgaaggattgttctaccttgtgttggcaaagtttggcagttgtcttcttttgtgtcctgtttgtccaatttgcacagcatactgtcagcagttgaggcaagggaggtttcttgcctagtggctaacttttgccacaaagaaagcaaactccatatggagattcttctatgaccatcatcgtttttttttttttttaagatttttatttttattatgtatacaacattctgcttccatgtatatctgcacaccagaagaaggcaccagatctcataacggatggttgtgagccaccatgtggttgctgggaattgaactcaggacttctggaggagcagtcagtgctcttagcctctgagccatctctccagcccctatgaccatcatcttcattcaagtagattggtactgctaggagcataaaaagccttatgttatagaaccatcttaaatgccatattctatagatctctgaagtgtttgaagaccatctatctatttagctaaaacatctctctgtttgaccttgaaaacgtatctaacatgatcacaaatttgttagatgactatctactaatctgtattccttaattattgcaaattgtttgtaataataactttcaaagattcgaaatttatattacattgttaaatgagttgcataagtacaatatgttaagaatagaaccatatatacagtatgataaaaataaccagtgaaagggaaggcagaaagactataagaaatggaggagggagagttttgtgaaatgtcagtgtctggataatgatatgaactcattacaactatagttgttttgtttttgccagttttgttgtgaaaagtttgtctgtggttatactttatattttcttgctttctaggaatattgaatatcttttttctctttttgttagtagttagcatttccgtctgtgtattccctgtttattctgttccattttcattgtgcttgtaacttctatgatattcaaaaatttttgtgtatgcattcttctagtccttttgttaactgtggtaataacatttcccagtctgacattctgtatgttgacatagttgatttgctttttatttttgaaaccattcacaattgtctcttaatcatattgcatcctattctttcctctttccctgccacttaatgtccttttttttttttttttttttttaaacatccactgactcgttagtgaacagagaacctgccagtatccacctttcaaaaaaaaaaaaaaaatgactccctctcctggtcagtagctccctaaacactctgcctttttatccttttcccaatttcatgcctttttgatcttttaatagcacaccgagtccaagtaatggtgcccttaatgcctctgtgtggggccatccactggaagatgggcaacctaccagggaaaacccttctgaagaaaactgactctccctcccccaggagccatcagtggcaaattgctccctagctggtgtggtgccttacacatccttccctcatctatgctgggatgttggcttacttaaagttgtatttttcaataaaatataaacctggatagtttccttttgtttttaaagattttcttctaatttatatgaccaagctgaatgttgcctggtagattctatgttaatatatgtacatggacatatttttaaaatacttttcttatattaatattaaatatggtttgctttttctcagattaagaatcatttttcaatcccaatttccgtttttgagggggatactttattgggaattgcttcacctgaaaatgaattcaacatacctttagaatcttacaggtaaggttttattttgttatctttttacttgccctgaactgttagagatttttagtttcagattctttataggtaatgtttttaaattatcaaactttgatccagtctacactgttaagtatctcatgtactctagatttcaaggtatctaggcatcttttcacaactaaacattaactattgtattttaaactgtgtattatttatacttttaataattaatgtagttattacatgcttacagtgttcccatcaggaccttacacacatgttcatgtgttttaaaatatctaattggatattatttggattctgcatttatagaattgttttataatacaagttttagaaattgttttagaaaacagcgtcatcttttgtgtatatgtattttatttatttatgggtagaattgtaatcttaaatatttaaaatacttgaaataattaaacttgatacaaatattatgctttaagaaaagataaatgaaatgatggtcaattaagacatattatttttatatcatcataaacaatgatcagggtatttaattcaaagtattcctttatggagattgaactttaactggggataaaatgttctgtagagttcagcactctagtttactatttcagaaggcacactaaagttgacagagcagtgatacaggaggagagaggcaatagtgtaagcagattcatatgtcccttagttctagtcactctgatctgtggttggaagttgaatatgagatttgtaaaactgagaaaacaggttagcaatttgtggcacatattttcacataaacagactggccaactcttatgatccatttatcttagtttagacatgctagggaaaagaattatattgttacagccacaacagaattaccatgatatctgactttgttttaaagatgatttcattacaaacttgcactaaaaggtaaaatgtaaaatatgtttaaaactttaattgtagtcttagatgatggaaattaatagcattctgctaaattcctttatattttataatagttcacagtaaagaaaacagtataattacacttttttgttcaattagttcattaccagccaaaaaaatctttataaattagttattatatgactcttatgtgtgaattttacattgatctagtgttcaggtagatgtacacttaattatttaagctttaagatcttaaagtagaacatggttatttctctgtataatttgaatatgttgattctttaatttctttactgagtggcaactactttcttaatatataagacactgtatggtaccaaaatgaattgagtttttctgttgctgttgaaactctgataaatatgtaagataagagacagttgtaaagaattacaaacagtattaaaattacaggaaagcatgaaaacacaaaaagaatgactgactctggatgaaggtacatgaaatttagttaaatagggttttttacctctacaaacatatagaatgaatacatacatattcattctctttctatatataacttatgttttaatatatagttagtagtaataaaggtgatttattaggatgacttacaggctgtggtccagctactcccaacaatgtctgtctaccaacaaaagatccaaaaaatgccaaagaaggctctaatgccagtgaaggaaaggacttactcatgagagggagagaaagcaggcaaagaaagggcagaaagtgtggcccagattgaaggtggatcttcccaccttgaacatctagattaaaggtgtattttcccaccacaaagatccagattagaagtgggtcttcccacttcaaatgacttaattaattaattttgaaaaaagccttcacaggtatgcccaactatttgggttttagttaattccagttggagtcaagttgccaaccaagaacagccataataataggtaaaggggaacattttaccatggagaatttgtgaataaagatgactccgcttaacaagatgaggcttttgtgtaaaggagtgagaatttcttctagacagtactaggggaggtggaatttgaaagagctgcagttctcagtgaactacttgctgctagctttatacattttttttgttatgtctttctcaagacataagtatgggggcagcttagggtacacagggaattttaagccagcctggactacagacgaaaaccggtttctatattaacagaacttaatttaaataagctaataaaagaaacacttactttgacaagctgcatgagtttgttggccttaatttgaggggaattaattttatgtaatagtagaaataagatgtaaagtagaataaaacttatatggatactatagaagtagcaaaggcaaaataaactgttttcacattagttttgtgtgttggtcagaagaccatcatttaatgttatctctaactccagagcactagtaactgaaagtcacaagaaaggacaataggtgtgaaagggtcagtgtccaagtgagccaagttacagtagcatcacatgtaatacagaaattcacagaggatatgtaaacttttaagactaaatgttaggaaagtaactaagggataaagattgttttgacaccgggcgttggtggtgcatgcctttaatcccagcattcaggaggcagaggcaggcggatctctgtgagttcaaggccagcctggtttccagagtgagtgccaggataggctccaaagctacacacagaaaccctgtctcaaaaaaaaagattgttttgacagttcatctataagaggtagttagaattataactagttttgcaaataaaagatacatacagaggattccttcagaagcaaagtgcttgcctgaaaagtgtgagggtctatccccaacaatgaaaaatggttagttaattaaaaacagtatgtccatacaaagactatttcttttttaaaatttttacataattctttattgactctttagaaatttcacatcatgcaccccaatcccactcacgtccccctccatatccacccctgcagcatgccctccaaagttaattcaaaacaaagcaaataataaacccaccttgatcctccatcttttcaacatccagtagcattgggagctgccttgtgccattcagtatacccatttgtcaaatcagtcctatctgccaaaatgttcattgcattgagtcatcggtctagttcagtgcctctggcataccaccatcactggactcttattgaaacccctctcagatattccaccctgagtcatggagctcctgcagctattgttccaccatatcagtcgcttcacgcactccaacaggtcatagatggggcagatgttagagtgggcacaggatgtggatcttggtgatagttgagttggtcggtcctggccattgggactgttcctcaggcaagaggcagagccagctctcctatgcctatgctactggagccagttcttgtaagcctctggtgaagggtggggccatctcttgtgaatgcagggagtggggtccagctctcccatgggggagcagggccagctctcctgcagtgtccagcaagaggcaggaccagctatcccagggccagtgaggggcaggggtggctcagcatagccctcaaattttaacacgcatggttcttatgacccccacccccttgtggtaacagaagccatggacatcagcccagaccctggctgctgtttggccatggacctagacatggcctacagcagtaaccgaggccctgacaacaccatggtcctgtatggctggacaggccacccatattggcatgaccccggtggcagcactgccctcaaacaccagtatggccacaggttgcaacctagaccccaggtatctgcgtggcctttggtacgtgggagacagacatcaacatatacttgggctgtgataggaccacacacacacatacatagaccttagtaggagcccaggcttgggtgtcaccatggccccaggtggcagcacaagcctctcagattggcatggcccctgcagcagagtggccctcaaacaccagcatgaccctaggtggctgcccaaacccctggcatcagcatggccttcaatggtattgggagccacagacatcaactcagaccctggctacagcagggccacagactcagacatggcgctcagcagtagccctggcctgtataagaccatggctccaggtggtagcagggaccactcagaatggcctggtcctcaagtgccaacatggtcacgggttgcagcctagaccccagtcatctgtgtggcctttcatggtaccatggccattgaaatcaatgacccaggctgtgttagggccatggacccattatggccctcagcagcagccttggtccggatgatactatgacctcagcactagcacagccctcagacaccaacatgaccaaaggatgcagcctaggtagcctgggtccacacatgccccctgatgccatgtggctcaggcagatgaaagacccacagagcatcctggatccttatagtctcgcctgactgaagcatccacatgcgtgtctggctccttgtcactcaggcatgtgaaagataaatatttcataaggataattcttggatgtagcttagtttaaaaaaaattacacttagggctagggagattgatcagtaggtgaagtactaagatttgaattctcaacagtcatgtaaaagctgtgcatggcagtatgcctgtaatcacaacattggggaggacagaggtgattctggggcttgtggaccaactaatttagccgaattaaaactccaaatttagtgagagactatagtcttctcatgcaaatgcatgagccctcacataccacatagaacagtatgtttcaaaaatactgaaatttaaacacatattgagatatatgtattaaagattgtaagaataatcatgatcaaaataaaacttggtgagcctctggaaaactggggttgtgattacatagctctgaaacataacatatgaaaatcagcactctttacagtaataagcagttgtcttctagtttaaggtttttaaaaatgattttaaattatatttaattttttgcgcagatcatccctttctttgaagccagaagatgaggactatcagatgtgtgaaggaattgactttgaagaaatcatagaatatgatggacaacttctaaagaagaaatgtagatctatatacccttctaagaaatcgtttgttattaatattgttccagaaaaagataatttgacttctctgtcggtatattcagaagacggctgggacttaccatatgtaatacacttgtggccacctatcctcattcggaatcttcttccctacaaaattgcttattatttagaggtatttaacagtttctgagtgtcttcttgtctttgtagcttgatttatttaaagttataaacaaaattttttgaagctgtaaccaagattatagcattacttaaaaataatataaatacttatcaaaatgaaaattttaatatcatgcttaaaaagataatttcgggcctccaaccctcacagccagagttgcacctccagaactcacaactcccataagttgttctctgacctccatagcaagccttagcattctctaccacatacaataaacaaaagaagtaattttcaaagaagataatttaaaaaaaaatgtttcattaatttatcttagaagtctactgagctgtatataattatatacaaataatatattatttgcataactataaataggcttatacaataaataatatatagtcaccatctgatagtaccatttattttatagccctttctcttcatatgcagttcatatattgtatgtttgaatgatggataatgaattatgaaacaagcacagaaactggtattgaaataccattcaagtacaatacctatataattaaagtttgtattgttttctattaagtgctcaattttagattaagtaaggggtttctctttctaagatacttttgtaaatatttttacttcaatgcttatcaatataaaataattcttcactgtaatctattcattgtgggtttatttaactttgtaagttgcaatatgtttatggttttgtgatttttttttccttttttaaaatttaaattagaaacaagcttgtttaacatgtcagtcccagttccctctccctcccctcccctcctgttccccaccaaccttcctatcccatcccctttctgctccccagggagggtgaggctttccatgggggaatctttaatgtttctcatataatttggagcagggcctagaccctcttcagtgtgtctaggctgagagagtatccctctatgtggaatgggctcccaaagtccattcatgtataaatactgataaatatttatataatatctggccgtggataaatactgatcccctgccagaggggccccatagattaaccagacttccaaactgacatccatgttcaggggggtctggaacagttctatgctggtttcccagctatcagtctggggtccgtgagctcctccttgttcaggtcagctatttctgtggatttctccagtcctttgctcatcactcttccctctctgtaactggattccagaagttcagctcagtgtttagctgtgggcatctgcttctgcttccatcagctactgtatgaaggctctaggatggtatataagttagtcatcaatctcattataggcaaagggcatttaaggtaccctctccactattgcttagattcttagttggggtaatgtttgtagatctttggacattttcctcgtgccagaattctctttaaacctataatggctccctctattatggtatctcttttcttgctctcctctattcttcccctgactcaatattcctgctccttcatgtcctcctctcccctcctcttctccccttctttttctcctagctctccccaccccatgctcccaattaactcaggagatcttgtccctttccccttctccagggaaccatgtatgactctcttagggtcctccttgtttcctaacttctctgggggtatggattgtaggctggtaatcctttttctctatgtctaaaatccatatatgagtgagtacataccatgtttgtctttttgtgaagtaggaggaattaacatatctgtggttatgctttaacataatgataagtagttggtacgtggccatcatgacttggaattgtatcctagctctgccaattactaagtttttagatagattaaacatttttatattttattgaatagaaatagtgataaaaacttatatggttaagtcgtaggaaaaatcaaattagtcaagtatataaagaatttactaccatgcctcacaggtacatggttgtcatttattagccgctttagcaccaccaacactaccatcattgttttgtggaatagtctgttccatgtacaagttcactaattgatattatttaaaactcaagaaattctgttgtaatggtaggaaggatctggggaaaagacaatagaaaagtcttagagataagaacaggtaatgaaggtgtgagtggaaaaaattagtgattttttttgagatataataaacaacatgggctggagagatggctcagtggttaagagcactaactgttcttccagaggacctgggttcgattcccagcacccacatggcagctaacaactgttggtaactccaagatgtgacaccctcacacagacatacatgcaggtaaaatgccaatgtacataaaataagaataaataaattataaaaaataataaaataaacaacatgaactgataatagatgaatgaataaaggcattgtttttaaaactggcagacaatgtgtttctttttttggattataacagctttcttttttttttaaggattttatttattatgcatacagcattctgcttccatgtatatctgcacaccagaagagggcaccaaatctcataagggatagttgtgagccaccatgtggttgctgggaattgaactcaggacctctggaagagcagtcagtgctcttaacctctgagccatctctccagccccctataacagctttcttatatattttttgttatttttagttttaaaactacaataactagtagataaattggagcttattttagttttactgattatggcattatagttacaactttctatgaagtttctcttgtcatttaatgttagccttttataggagtttatctagagccttttaataaggacagttactcaaatgtaggccaagcactagggtagacttaaagcttgaagaacactggtgactagatgacagttacttcaaaagagttttgtgtagtatgtggaaagaataagtgtatttgggagtgtactttttagaagcatgtttaagtttgtttatgtttttgcttcttattctagggcattgaaaacacagtttttaatctaagtgaaggacattcatcacagatttataatgttgaaatggacaaagctaagctgcatttaaagttgcttgactatcttaatcatgactggaaaagtgaatttcatataaaacctaatcaacaagacatcagtttcatcaactttacctgtctcacagaaatggaaaagactgatttggatattgctatccatatgacttacaatactggtcagacaattgttgcatttcatagtccatattggatggtcaataaaactgatcggatgttacagtacaaagcagatggaatacaccgaaagcatccacctaattataaaaagccagttctcttttcctttcagccaaatcacttttttaacaacaataaggtatgtgtcattttttctaacttttactctttagataaacaattctgtttcagtttttagagctctaaacaataaaatataaaatttagatagaaataacgtttgttaaatatttgagattaaaaggttagtatagctggctacagtagcatgtgcctataatcccagcatttgggaggcaggagaatgttgatttttgaggcctatatatgttcgtagtaagttacatccaacctgagctataccctgtctcactacacgctgtctcggaaacatctagccaaaacagtaaccatttaatgttaaagatttattacattgttagatagttttgtttttttttttttacatgcaaagctttgagtttgaccttccataccatacacagagagatggtatctaaattgtaatttatctcatttctccccctaggttcagcttatggtaaccgatagtgagctctctgatcagttttcaattgatactgttggtagtcatggagccattaaatgcaaaggtctgaaaatggaataccaagtgagtttcttctgtgctaaagaaactttcatcaaaactatatttgttggatacttaaattttataagtgtacaatagtaatagttttcaaacagtcttaattgtttccttaggttggtgttactataaacctcagcagttttaacattactagaattgtgatatttactcctttttatatgattaaaaacaaaagcaaataccatatatcagtggctgaagaaggaagtgataaatggctctctcttgacttagagcaggtatgtaaataaacttcacactgtatttgtatttctatgttgagtgtatatgatagaatatgtgaaaataccacagtgaaacccaatttgtaaagttaatatatgctaattaaaatgtactttttaattgtgttttacttttgatgttacattccttaaatacactgttttaattccctcatgtcctaattttgtttcagttccataaaattttattgactgtttcttctaggtttttttaattattaaaactagtcctttgctctctagcttaatcaggataatacatactgccaattctaacaagtttggttaaataactgtattagaaatttggaaataacagcactagtagtataaataccattaaagagcaggaagttattagtttagaatttaagctaataatttaaactaataatttaatagtttagaaattattagttttagaatttctattagggttgattttgaaataaatgacatcagatttttgtccactgaagtttcattttattttattttattcattgttgatgaaagttaaatttatttattcagtcatcttcaaatattttttcttttttatcattttttatttaaaacaatcttttctcattttacatatgaatcccatttctcactccctctcctcctcctgttctccccaccttcatcccccaacccccatccactcctcagagagggttagatttcccatgcagagtcaaggaaatctggcacatcttcaaggcaggaccaaaggaaggcccttcccccctatatctaggctgagcaaggtatccctccaaagaaaagaatgggctccaaaaaccagtcaagcactagggataaatcctggtaccactaccagtggctctaccgactacccaagccatataactgtcacacccattcagagggcctggtttggtcctgtgcagtttcctccactgccagtccagagttagtaagctcccactagctcaggtcagctgtctgagtggatatccccaaaatggttttgaccccttaaatcatattatcattcttccctctctttgactggactctgggaggttagcccagggcttagctgtgaatctctgcattaatcattatttctatagcagtgttttttgtttgttttgtttttatgtcaagttgtgggggtgttatttttttgtttctgctttgttttggtttgtaatgtcttatctttcccaccaatatctttggtttcctttttcttgaaaattatgttacgattctgtcatttctttgcaagtgactggtctttcttctttaattgcattataggtcttttttttctgttattaattggtatcacataactgtatcagtacatgaattactgattattttctgaggtacttatatatctgtggattactactactttctataaaacttgaaactaatgactcttttaaaaattaattttgcttcattctaaggtgtaccaagttaagcttttctattacctaaatcttccctgaaaacttatgttaagtattgggactgacctctcagcaatgtggttatttagggagtgagcatgagagacagaatataaacagactctaatggaggagtttttgagatttttgagagatagtcaaaaagaccagtattactggagaagggaaaattagaagacaaagccataatgggaataaggggtaattatgtagatttttgtagccgtcgaaaatattttaccttaaaataaaatggggatttgttagaaaggttttatcagtgattaaaaatgttagaattttctggcagtatactgtaatggctagcaagatataaaaacaattttaataaattagagccaggagttatgattgacatctttaatcccagcacttgagagtcagaggctggttcctgtgagttaaagccagcctggtctacatagcattttctacaacagcagggactaagtggaccctgtcttaaaacacaaaaacaaaacaaaaaagattttgatcggtgattaaacttagtagattctcagtaaatgttttccaacttaacttttttgtaagttttcaacaaattctcagtaagtctcttcatagtttctctctgtacatcctgccagctcccaaaccaggacaaagagacttcttactatgaaagctcagccgatagcttatgcttatttctaactagttcttgtaaaataaattaacccatattttttaatctactacttttatgtggctcggttacctttactttgtaaaacccatgctgcttgctctgcatccctagcatccccttgacatttcaccttcttccaagcattttctgtcccagaaatcctgcctagctattgaccatttaggtttttattaaaccaattccagtaatgggtcttcacacattgtaaaggattattccacataataaataaaaaggaacggttttaactctagtacagtaaacctatatacaataaaaacaattatcaagtaagaattacattcattatatccagcccattagtatttggagaatttagagaaaatatttcattatctatactctcttgatgaatctaaagttttgtacctaagttgccttctatcataactaaggaaaactataattatctagtcttcaactccatcaaacacccctaaggatgtattacctgtgtaaaaaagaagtgtagtgcaggccacttccaaaactatagaaatgactgaaacaactatctgtctagacagtcacccaaggttcttctgtaaatttggggcatccaatcttgggcttataggcctagaatatctggcagactcttcagtgaagcaggaattttaaaggaccggcccaccttgttttggcaaagtttgacagtcactttactgtgtgttctgcttgtccatttgtgtagcatgctgtcagcagaagaggcaaggacagttctttgtgcagtggttaaccttgccacaatgaaaggaaactccatatggagattctttgatgcctatcatcttctctgcagtaaactagtgcagtctctgaagtgtttgaagagcacctgtctatctaaactatatctctgttttaccttgaaaacatacgtaacatggccacaaatttgttagaagactatctactaacctgtatttcttaattatcctaaattgtttgtaataataagtttcaaggactagaaatttatattacattgttaaatgagctgcataggtacaatactttaaacaagagtagacatatattacagtataacaaaaataacctgaaatttgtatcaatatacaaaaatccatatcaatgtaaaataatttgagactagtggttgtttaaaagtagactcaacaatccacccttttatctcatttttatactatatcccccttcagaaaaagatccttgactctaactcctttgtttagctttttcctgactatggccagtaataagttttaaccaaaccccctaaatgatgacaatcatcaataacccactaaatgaccaaaaagaagaaaaaaaaaaaaacacccccccattccttgggattgtgggtgttgtgttctctagattgcttagtgttgtctgggggcactggcatctttggggactctgagaaaattatgataatagttaaggcctggctagaataatccgtgaggctggaccatctcagctagcagccttgaaactgttctggatgcagaactctgaggaaacgacgaactttgagaggcttggccacccgttttattggtatccagtctccttgctctgaaaacacacaaactttcaaaggtaacatatatattataaatatatatatgttatatatgttatatatgtttttaatgtatatatatatatacattaataaaagcatagatttacacaagccaaccaaagatgatttttttttatgtttgagcaggtaaaatatgcattacctgtcttttataattttttaggtttatttatttatgtagccaggatattggggagtctcacctgatcaaacctgatcttctttaaccttgaatgaatccacagcctttcattttctgtggaaacaaaagtttaacatcatccccaaagcaaaattgacttatattttaaagttacagcatttctaaagtatctagtctggtttaattcagcagtccctttcacaatcccatgtgtcccagaatctgtggtttcctttcaacattcaaaaaattcaaagacaatacaataacatacctgtgtatttcccatctctacatggcttatttattttttaattaatctctctttaaatactctattattttgttggttttttttttcttttggggggggcatttcgggacagggtttctgtgtgtagctttggagcctgtcctggcactcgctctggagaccagactggtctcgaattcacagcgatccgcctgcctctgcctcccgagtgctgggattaaaggtgtgcaccaccaacgcccggctcatttttaacgtttttatcttgtatgttttatcactcacagataatgttgagtcctgattatcttttgaaaactacatctgtagacattttttcaattttaatttttctttttcaatttcatctaagataaattttcttttgctagcttaaaatttttcattcttatttgatgtataataattactttaaaatgtttgatcatgaccattatgtcttgttaagcttagactccctttccaactaaaaagtttaaaagaagcttggtgtattttccagtctccagagatcccatacataacacttagaaaagatactgtattgttgttttatatgttatgtaattaaacattaaaaatatggtccgaaactgggactctaaaggaacttcaggcttggggtgtttagaatgggcatcattttttaatatagttggtttctcattgagaaaaggttctatgagtattgttgctattttgagccttgtagtttctagggtgatgacagcaaatgagagcagaatagtttacttgctactctctaagactattaaatgacataagtatttatgatgagttctgtttaaatacgtgtaatacatttttagtgtatccccttttggcctgagactgcctccaatattcttcttattcgagttgaaaggagtgaagatcctcccaaaaggatacattttaacaagcaagaaagttgtattttattgcgactgaataatgaggtgagtgctttctcttggtgttcatattcattatcttgtgtgtatcatcagaaaaatgagtgtatgtgtgtgcacacacactacacttttctttttgtaacaaataatttcccagtgattttcctcctttattaaaaattagtcaccatttctttttatgaaaaaaaagtgaaacaaatataaaataattcattatatagaaagttagtgggcacgtttagaataaacactggaatatactcaaatttcatttgtatacgatagctagaaagaaagaaagccagaaacgagcatttataactaataatcttaaatatccatgtcatgatttgagagctggctggtggcccaaaaaagaaaaagcctgctacatttggcacccaatgtggcataaactatcctatgagtagttttagtattaaatgttatcagttaatattcttagcaagatgatcacattaaatttttttctttcctttaagcttggaggaattattgcggaagttaatttggctgagcactctacagttatcacattttcagattaccatgatggagcagctacattcctaataataaatcatactaagaatgaccttgttcagtacaagcaaaggtaaagtgattgtcacaatatgattagcagatttatttgaggaaatgtaaattccttctaataattccttaagaaattgccgttaattttattgaatttatgttaaagcgattctcttttcaaaacatcacactcagttatacaggagtagaactgacttggtatttataattatttttaaagacacatggaagaactaaagccagtgtcacacatattagtcattttgaaatctgctgaggaatacatcaaagccagtcatgagtccccaaattttgtgtcctctctctctctctctctctctctctctctctctctctctctgtgtgtgtgtgtgtgtgtgtgtgtgtgtgtgtgtgtgtgtgtgtgtgtctgtacacatggatgttgtatttgcctagaggctagaggaagatgttggttatcttcctctctggctttccaccctatggatagaatctgttactgattctcatgattgtagcaagcactttaccaattgagccatctccctagtcctgaactgtttcttatagtttttaaaaatatgatgtgcctaattttcaaatttttgtcaaacaatagatgctgtcttttccttgctccctaataccataaccaaacataagtcaattaggatggctattaacatcatttattttgattttctatgaagttttgtcttttagtgctgctgaagtttctaaaactgtgttttcctctacttaatgactctaggctacctcaaatttgctttttcttgttgttttttttttattttcatttgtttaattagtttcagtgcatttatgcacatgtccttcctctgatgtttatttctaattgttgattaaataaaaaagtgtttctagactacctttctaagtacttctctccctggtgtggctattacactacgaagctacggtctttatttcctcaacattcagagtctgtctctggttatttccctgtaagaagagcctgactgctgaagaagctctttgtgaccttataattgctatgcataggcttttattgcacctttgcaaggtccatttctccatgtttaagatatatgcaaatacatagctaacattcttagttttctttttctttgaatcctcattactatcaaagataaggcttgattaaatttttataaggaatgttttgcatttaaacattaaatctttcctttaaagacaaagttatcagctaatcagcacatttacatttgttttttttctctgttatatgagaaacaccagtgggggttccctcttggtgtcttcagttcctttttaaaaagtggtaagatagatttatgaatatttaggaatttgttaaatacttaaggctattatgtcctgtatataatataataattgttcattttaattctctagtaaattagctttaaaaagagataatctgtctaatcacagcacttccgtattttgatgtattccattccatgttccttttctcttttacctacccatttaccgatttaatttttagcactatggcaaacataaattgtttcaaaacatgattttttcgtgaacatatatttagaattttgttcattttccaagtctataatgtcaatgtttttatttagtgtttttctcctggtgtttaaacacgagttttatttagtggcccaagctaaccttaaattcaaaaatatcttgcctcttcctcataactactgggattatggagtgccattaggtttggttgtttatcttttaataggaatatttaacctgttttagtagttataactgaattttatctctttgccttgtttgtttttgtgcttgtggatgtctatgagtgcatgcgtgtatgtgtggtgttctcatgagtgtgagtgcatgtatacagtgtgtgtatatgggcccaaagtactgcttggcgtctttaatttctcttcattttatttgttgaggtggatctctggctgtgccaggagctcatagattctggctggtcttgtccccgggatcccttgtctctgcattctgagtctgggttttaggaaacacttatctggggatccaaactctgttccttacactaatgctgcaagcacttaatccatggagttatatccctgtcctttaccataatattatatcatatatattatctaataatttggaaaataacttgttctgcttgtggatatgtgaaattagcatcatatctaattaattttcactttttgttattgttgactagttttgaatctgggtattaaacccagggtctgcactacttttgagttcaagtactttatctttgtgtgtatgtgggtgtgcatgccgtatttgtacaattgccctcagaggcaagaaaggggttcaggctctctagaactagttacaggttgttgtaagtctcctgaggtgagtgctggaaactgagcctgggtcctgtagaagagtgacatgtatttttcacatctgagccacctctccagcccctgtttagtacttttagaatatttttctataatttaaagtaaaacaagaagtaatttcctcagaaaaatgtttacagtgaaatattcttgttttcttagagaatacatttttcattggaagaggtatatcattctgaaaggaaatatagatgtgctcttttcattgtgtaaggggaaaaaaccttttctagtcttaattagaattttttacaaatctcagctaatgggataacaatgaaatattatctaggatttttatgtttttgtcaattgcatttaacttattcatatttttattacttactgtcagttctctcaatgaaatagaagattcccttcctcctggaaaagcagtatattatacatgggctgatccagtgggctctcgaaagctgaagtggagttgtgggcaaagctatggtgaagtaacacataaggatgtaagtactaagtcggtcattatggagttcttagctgcctttctgttttttatgcaggtgttcttttactcctagttgattttaagggctgtttttttgctgttctgtaaaacctaacaaagatttttttaaagcggtattaaagttatttttaacttttgccaattttatttaggtttatcttttttcaaattctaatcagaagctaagtagaaatggaaaccagtgaccagtctgtcctttctctaaaggagtatgcaaggccatagcaagagttggcatgtaccatgttctaagaacatcaaagataattcctgtctatgggcttagagtccattttttttttttttttggttttttcgagacagggtttctctgtgtagctttggagcctatcctggcactcgctctggagaccagactggcctcgaactcacagagatccacctgcctctgcctcccgagtgctgggattaaaggcgtgcaccaccaacgcccggcaataacttattttgtatacattaatgtgagggtgtcagatcccctggaactggacagttgtaagctaccatgtgggtgctgggaattgaacctgagtcctctgaaagagcagccagtgctcttaaccactgagccatctctccagccccttattttactttttatctatgtattattattatatgtgtagatttgtatatatgtgcatacatgcacacatgagtaaaagtgtaccacagacaaacttgtagaggtcagaggatggcttgtgtgaatcagttctctcctaccatatatgttatcaggcttggctacatgtatttttacctgctgaatcatctcattggtgcctaacacagtgtttataaaggagattcctaagtaattgttgaaaaatcagtgctttatttttttgttgttatatatgacttttatttgtcttatattttgattcaagggatcccactgtagcccaggttagcttagctcatggcaatccttttgcctcagcctctcaagtcctgtaattgtagatgtgagttattgcactcagttgcttcagtgcttcataaggcttgcaatcgagattacaaatacctttttcttactctgctatggaaggaaatgtgaagttgaagcttaaacaacctttaatatgtactgcattttccatagagttaaaatgcagtagaaaaaaaatactatattttgtgttgttagtttagcttataggactttaaactagtttttattgtgatctaaaagtactttaacaactgattttagttcatgattagcagtgtcattatcatgtagcagctgacatcaggttattttagtgaggaaatcttccaggtattgtacaaatattcattctgtagattgtcatgaattgtctgaaattgctcatatgagtaataactctctccaagtgttatacaagtgttcatttagtttgttgcctcagctttaggaagaaaagctattcatatactcatataaatgtcaagtatagacttaatgtttgttggatacaaactgattccctattttttggttcttttcttttaggatatgatgacacctataactgtggggaaaaaaactatttatttagtttcattctttgaaggcttgcagcgtattattttattcactgaagatccaaaagtgtttaaagtaacgtacgaaagtgaaaaagcagagttagcagagcaagaaattgtattggcattacaagatgttgggatttcacttgtcaataattacacaaagcaagaagtagcctatataggcattacaaggttagatgcattaatattagaagtaatgtttggaataatatttcagaaataaatctcagagtctgttcctaaaaggctttaccttatttggcttcccactggcttctgttatctctgtgcctagtgtgtgcctaccataatggtagtctctttgttcttcatgcaccacaattgtctactgctctaggtcttgttaaagttgataacgtgtctgaaatgttgttaacctctttgcctccctaaaagttgcagaaattacacttctcaattcggccctactgactgtttcatcttaataagacgtttcctaccacttctggtagccaagactgcagatctgtcttataacatctacattttcttataccaaaagcattttcccttcctacatagtcaaactgattttagttcatgattagcagttttatttattcaggtttatttattcaggtttactattatctgtaactccctagtgaaaatgaagaatgacagggaagctcactggtattttccttcaacttgcaacactataaaaactaaaaagcattatttgagtaaatttatgttttaaattatctgtgtgcttacatatagctgaggctgttggcaaaacttgggtagaggttctgtagtttatgtgacacactactttaattgttataaattaatactgtgatttctgcttttatatgtaagttctgatgttgtttgggagacaaaaccaaagaaaaaggcaaggtggaagccaatgagtataaaacacactgagaagctggagaaggaattcaaggaatacacagagtcttcacctttggaagacaaggttattgagttggacaataacattccggtaaatttaaaaagtactggtgtgaacttttaattttacattctaatttgaattatttctttaaggagaaactgacttcttacaaacatatcgaatgtaattaacactaatgtacatacttcatctgacctgtttttatattaagaatgaacactcaagataccagttactaattatttttaaagtaacaagaagcaagttttttttaagatttgcattattttattaaagtcagttttagtaattacatacaaaaagtgatacagccaaactataatgtttatgtgaatatttatattaattttaataggaatgaaaaatttgaatattaaatctgtattttaaaagctttctttttgttttgggtttggtatggtttagttagttttgccctggctggcctaaaactcaccatctagaccacgctatccttgaggatggcaatcttctgtgtatgcctccagagtatgagattacaggcatacactagcatgttcagctttaatttattttttctaagttaacatataaagtaatgaattccatgaatatatcattttactttgctcctgctaattcccctgaccctaccactctcttctgtagattttacattttaaattactgtatcctaaagttattttcatataaatttatagttttaatcaatggttgaaaaagaaacatctcattgttgggagtgggttgattttttttttttttttcaggttcgcttaacacctagtggcaatgacatgaaagttctgcaaccacatgtgatagctgtacggagaaattacctcccagcactaaaagtagaatataacacatcagcacaccagtcgtcattgagaattcagatttatagaatacaggtgagtctggaaatgaaggcaaaacaatgaaagtccaagtacatttccctggtctgttttatctagcacaaagccaaagaaaaaggtaagatggtagccaatgagtagaaagcacacagagaaactggaaaagaagccagggttacacatgcctataatcccagcacttaacaacctgaggcaggaggatcaccatgagttcaagaccagcctggggtacagaatgagactctgtgtctaagaaggaaagaaggcacagagtagggagggatagtttgggagaaagagggaatgaaagaagggagggactgaagttggagacatgagggatgtactgaatccttttcttgtatcagctgtgtgttgactagtctgaatctagttctaaaattctgttattgtggtggggttgtatatgtgacctgctatatactgattcatgtttcattttcttagatccaaaaccagattcatggtgctatttttcctttcgtgttttatgctattaaacctccaaagtctgtcacaatggactcaggtgtgtgtttatttttagattgtagtatagttgtatggctaattgttttattgttgttttggctataaagatagcattctcaagtttagtttttcaagatcattagataataaaactgcttactgacggactaggaattattcaatagagcatcctgtgaatgctgagggaaaggttacttagaaaagtatgtattggcgttttatttaggaataggaagtttaaaccatattgctgatatgtaaactaaataataaccttaaatatttaaaatattagaaactgaattaaacaataagaaaatttagatttaattttttttaagattttattgtttagtttatgtgtatgcatgagaatgtgtatgcctgagagtgtatatgtgtactgtgtgcatgcctggttccagaagagggcatcagatgccctgcaactagagttacagattgtatgctgcgtagcattggtgcagggaagagcagcaaatgatcttaaccccttagccatctatccaacccccggattcagcatttttctgactggttctgtgttctccaaatgagaataactgacattctttcttcagcccttctctcctcttctatgcttcttctgtcttccttattgatccttctttaccatcctttgtctttgctccctaccaccattacatccacctctctttgcctcccttttctgttgttctcaccacagaccaccccatatcatgaacttcacacttttgagtagcttttcttcataatttcttgcaaatcttttaaccaccttacttgtatatgctaattcccttagaagcatgaaccattctctagaatatgttttcacaatttgctgatgattctagtccatacctctaacttaaagtcattagtttttgtaattagttatccttaaagtgactgcagataactgaaaaggtagctctgggatctgaaattaagactaaatgaccttgtagatgtcattaattttaattgatgctgctgatttactacattgattgattttccactgacgtgtatattaaattgaagggaaatgcctaatctttggcttaaaatgtgataagcataattatatttttaaccttcacagcaccaaagccctttacagatgttagtattgttatgagatctgcaggacattcccagatatcacgcattaagtaagtgtttcagatatttcttgtgtgtttaattttttatgtctgacatttgaatatttttgttcttgttaaaactaaatttcagtccaaagccacagagaaacactgtcccgaaaaaccaaaaaacaaaaaaaaacaaaaacaaaaaaaacccctaaatttcaggtgagtaaaatatttaagtataggataataaattttaaaggtaaaatgaaatctattgagtatttgatattcttagtgagaagattttaattataatctacctaaaggttaacaatagctgtttctggatcttgggtattttatttttatatgcatttttttctgttttaagttatatataatgaccatacattactttggaaacagcgataaaagtaagatttgcatctttacccacaacttactcattcccagaagcagattatggaccacagcatcaatctaagtgatactcctcctttatttcttccttcttatcattgagataaataatattcattctcctgctttaaaaaaatggagtattataaagctgatcagaagttttagtggataaagacagtaacacaagtctactatagcctgagttttatctctggcaccttcaaaatggtggaaggaaagaacagcctacacaatgtattgtggcacacatcacacacacacacacacacacacacacacacacacacacacacacacacacactgataataagataaaatttaaaaataaataatatattgttactgtgtatgtatggttaaactgcttttatttttattttctgattttctttaatttttttgcctttatttctactttataagtatgagtgtcttgcctgtatgtatgtctgtatacctttatacatgccaggtacctgctgagtcaatagagaacatggaattccataggactagagttacagaccctcaagtgggtggtgggaatcaaacccaaatcttctggaagagcagccagtgagttctcttaaccacttagccatctctctagctagttagatgtctaattttctcagaaattttaaaactataaaagacttttaggacttgctttttttaattaaaatttttatttaaatataatgttttattgcatatcgtttttgtttgctcatcattgttgctatgaaatggtctgtctcataactttttgtcacaagtcaatttcttttctgtggccactttgctatttttgagtttcttgctgttatagcatggttcattgctttcattcctttagtcccaagtttcaaagttctaatttatttcatctaattcccttaatgtatttacttaaaaaggtttttaatgcttcctacattttaatgtaggtatttcaaagtgttgattcaagaaatggatctcagattggatcttggatttgtgtatgccatagcagaccttattccaaaagccgaggtgactgagaaaacagaggtaagacttgcagcatttgacaggaaaggatattaaaagagacagtctaagaaaatattaccaaactttgtagataaagttgtagtcattacctggtcaaattcaagaatctctcattacatattaaatgttttaattttgtacaaatgttaatgtgctttctgtctttaacatttatatccacaaaatcatactatataatgttggctaaggacatacttcttaagtatttataagaatttcatacatgtatacaatgaaatatattcatccccatttcccctttaactccccttgaattcctgtcacttggcatgtttttaaggcttcgtcatgttgtaacatatatattagcatttcattcttttttatggccaagtaataattcattacataggtttggaacactgtacctatttatttgtcaatcaattgaaatatgaattgcttttgcacatggactaggatgatgatgtttattgtgtacatatttttctgttaccttatgctttttcatttctcttatatatacatttctaggagtagaattgctaagtaacatggtaattatatttaatcaaattgagtcttttaaaaaattcactctctaatattttcatatgtttgatcatttctacctgttttcattcttactgattttcattctagcatgtgtgagaattgtgatttctcaaccttccctacaacaattactatttgtggtttttttggtttttttggtttttttttttttctgactatcctagtgggtatgaactggcttctcactggggtttgtacaactgataagaatgctattttttaaacttttatttacatgtgggaaataggagtatgccatagcatacatgtggaggtcactggacagcccatgggagttggttttctccttcctccatgtgagtgctaagatcaaatttggattgtcaggctttgcagtgactatacccactgagccaacctagtccactgctgagaatcttttaatgtgctagagatgtgtgtatctttagcggagagtgtctgctcaggctctccaggctgtcttcttactgttgaatttccaaagttctttgtgcattctaattggtctttgacaagccatatgattttcaaatgttttcaattgttttggtagttttttgaagcatagaagtttttaatgttaatgaagtacaagttattttttcttttatttattactattcatgcttttagtatgcttctaaatcatttgtcaaatcctgtgttaggaatattttaacatttatctaagtctttaaagcttaaacttttacagctaggtctttgatccatttgtctcatttctcttatgtgtaacataaagacctcggttcttctggaagtgttgtcagctgtctcagcagcatgaaacactgttcactcctctattgcatagctagcttcttttgcggaggcaggggaggggaggttagggggaatacataattttactcctgaaacctgtgtatgtatttttttgccaaccttaattgttatcatcagtgaattttataattgaggtatgatccagtacttcactctttttcaagattatttaggctaacttgagcccttaaaattcaataagaatttttaaattagcttgtcaagttcttcaaacaatacattgtaatttccagagtattgattttgtaatttacattttattcttaggtatttatttttgtttgattattatgcatgaaattgttcatattatatagtgtcagtgtggggttataatactactataaacagaaatacaactaactgttcttgatatttgctcttgtcatttgcaacttactgagttcacttgttgcctctaattatgtatcttcttttggctttttgtatgtaagatcagatcatctgagaaaagtagttgtatttctttggttttgatgtgtgtgcttttgttttttcatccttatttgctttccttgaagctagtgagatgttggacagccatgagagcaggcattggttggttgtttctgatttatagggtagattttcagtataggttaccctgaattcttccctattttttgacagtatatttaatacctacatttatatggtattgttcttataccttagacagacagatttggttacctattattttgctaaagacttttatgttcatattcattaaagatactaatctgtggttttcttgtgccttttttggtttggttttgctgttggaatagtaatagctttgtagtatggtttgagaaatgtcccttcttcctctatttttttggaggcatttgtgaattttgatactctgaaatgtttactagaattctgtggtggtagagttgtatgagcatttcccttccagacagttttggaatcacacttcacttcttagagataattttaaatgatcagtttcttcttgagtcagtttcaccacttttctgtgattttaggaatctgtccttttcatctgaggtttctagtttattggcataaattatggatggcatttctttataagccatctacttggtaaagtcagaaataaagttccctctgtagtcctttcaaagaatcagtttatcattttcattgtttattcttttgttttactgttgtgttgcagaaatggagttcctgtcttccctgactggaaactaaatctcacatgagaccctttgcttcttccatatatacctttctagtgcttggattaaaggtgtgagctctgttactcttttagactgattcactctcctgtggcccagggtggtcttggactcaaagggatccatctgtctctgtatcctgagtcctgggattaaaggtgtgtgccaccactgcccagcttctatagctaaccagtgtggctggctgactttgcattctgatctccagtggctttattagatcatcagcactatatcaccacaattcccctttttgtgtaatacaataggaaggctataactaatataagaaaaaccatgggcaataagtacaataactatatacaatatagacaggcaataagtacatcaacaatgtctagtccatttggattagacaaattcagagaaaatactccattatctatcctatcttggtgagtccagtcttgtacctaatttactttctattctaatttgcattatcaaattgtcttttaatgtctgttaacatgttgctttaattattcttaaattcatagcccccttcctcctgctcgtgtgtttgttctttttaattttctaagctagattaggttattgccttgagatctgttcacttccatttttagttattggtgtgtacatatgtgtgtgctttcacagatgtggcagggtgtgtatgcacatacccgtggatgccagagtttggcaaatctcaagtgagtgtggtgttcactcattgtcttagattgactgaccagcaagacccagggaatatcccccgatctgatattccaagcacacaccatcgtacttggatttttacctgggttctgtgagaatcaaactcagctccttatgtttgtatagcagtctccttttgatctaagtataataaattacttgcttgaatcatgtatgaaaagaaatgaaaaatatacatctatgacaaatagatgactgattgctcacacttatgagaaaaaaacttgagatgttttgcctttctcctctcattgccccctcttgttcttcctcctcataattcctcttcttttcacatataattatataatatacttataacatgtaattaaagttatagttatattaaatcttgaatctgtatatgagaaaaaacgtaataatgcttacctttctgagtctggtcattttatactcatcatttcctgggtctttttctttttcatatggattcaaattaaagtctgaagtcacgtggtgactaatttaatttgtcagcttgacacaatctaaagtcacctgtaaaaagaagtctcaattgaggaactgtctaaattaggttggcctatgctgtctggggtttgaaaggtgtcttgataacatgactgatggcaggagaccagccagattgtaggaggaccattcccatctttgggttgtgtaagagcggagagcatgccctctctctgtgcagtcaacttgctgcctgtctgtggaggtaactccctgcttaagttcttgccttggcctccttacagtgatgtgctggaacctagaactataagctgagtaatccctctttcccttaaaattgcttttgttgaggtgtttcatagcaacaggaaacaaaactaagacaggtcacttgctttcagtttcagaaacttccattactacttttttgtagctagctagtaggttggctagccacagattctcagactttgattatcttggaatattctttataacttcttcacttccaaaagtagttctgttgtatgtgggtttttggtctgtttggcattgcagcactatgagtatttgttaccttactatctttttacaaaaatcaacatttatcttactggcatctatataatgagctttctgcttttaggattcttctgtatctttcagcatttttagtattatttttattgtaattcggtttgcatctgttgtacctagactgagttcacaaatttcctggatatgtattttatttttcagtaatttaggaaaagtttcaggcagtatttggagaattgattttttttcatttttcgtatacagctataattaccatgtgaatatgtttaatggtatccagcttatcatagaatcttttcagtttttacttttttttagctgcataatttctgtaacttcaagttcttaggactttttttcagcacacagaaataacttgggtctgttcatatttgaaaaagaagtgttggtgattaccaaaaataaagtcaatactaccctatgaaaaattatttagtaccttttcctttaacatttgtattactggcctctgtttcagcagactgttatagaattgtgtttaaagaagcaaattatccacaaaaatttgttgctggaatgtattggtgctcttgtaaaatagaatctatagtcacatgaagaaaagctgggtaccatttaatagaaacttaaaagatagtttatcatgtggtttgtgacagactttgtagcagtaacaagttacttctgaagcagtaatttcctattaagcataatgctgactccaagtgttaatagttttcttcaatctgtgaggcattgcctttaaatatcttacataaacaagtcctcttggtgtttatattccttgtataggttgaatattttaataaggatgtagaaacgtttgaacaggaatatgaaacagtttcatcagtagatcaatcccaaatcaatctctttgaatattttcatatatctcctatcaaggtaaggaaatacataatttttgttttataaattagttacaaattgatcatttttttgagggaattagtatctaaattattttctgtaataatatagtagttgtatagttttacagttacagatagaaataacagaggaattgatcctttactttttttaaaaaagtatattttactatttggaaataatatcgaaatcacctacatcctgggcctatacatcttgactttttgttacttaactttatctttttcataattgtgataattttcaaagtttaatataacgtggatgatgtagttataggttaattcataaagtggacttaagtgtcacagggatattatctactgactcccacatgtgtacacatgtgtgcatgcacacaggcatactgcaacacaaaaaaagttgcacacagaattatcgtttgtacatatatgagtacatgcctgcctttgtcacagtggataggagattagaggataacctcctctcctttcaccatgggttctgagtttgaacttagtttgtaggcttgcatagtaattttacctgctgagccatctcaccagcctaaatctaagttttgattttggttttaatgtgtgtgcatgtacttgtcactgtgagcatggaatcagttttgtcctttggccatgtggtttccaaggattgaattcaggttgtcagacttggcagcaagctccttaatttattactaagccatcttgctagtgctaatctaagttcctaacataatttctgcaagttacttatttaatagcacattaaattatctcacaattatatgcatatgtgtatgcatgcactaaaacacaaaagtgcttttaaactgactttattgtgctaacttaattctgataattgaattgtaaacttttggagatgtgtgattattattaacaactgcaaaatctaggttgttaatgatactaacacatatattaaagtgaacattttcctaggttcatcatagtgccatgagaatagagttgcagatgggtgtaatagtgtttgtgagatcagcattcatgatgctaaggcaagaatgattccaagtccaaatagcctgggctatgatactgtctcataaaaataaaaaaggagtagaattcaattatgaatatcaaactgttgaattttaaacattgctatgttaattttgacttaaactcttagttactaagttttgttaaactgttagttactaagttttgtcataattcaggtaactttgagatcttatctatgttttaatgaacttagtattaaactattttctaaaagttaaagtttccactatggggaaagtgtttcaatgtatttctttatctcttcagttgcatttgagtgtttcactgagctctggaagagaagaagctaaagattcaggacaacgtggaggactaattcctgttcattctctcaatcttttgctgaagagtattggtgccacccttacagatgtacaagatgtagtttttaagtatgtttaatacttacatctatagacagatgaatggaccatttatgtttaccaaaaatttttgtaaatttgaaaattatgggcaaattgttgttcctgtctttaagtgtgttataatcaaaaataataccaagtattttatctgtccttaatgacctagttaagaataatttttaagtaatttccttaagaaaagaagatgtaagataattcagttttatgtactttagaaactctaggctgaatcaagattccccaaaagaagtggatacttaaatgttatgctatttaaaagatagagctttcaagcccataagatgaaagcttttcaatgagtatgtgactagacagaatacaatgaaatggacaatgaagggatcaatttaaatgaattataatcaagcatttatgtgagactagacattgtgggacacatatgtagccttggacttgagaggctaaggtggaaagatgactagagttcaggagttcaaaaggagcacatacaacatagtgagaactcatctcaaaagcagagaagcaaagcccatatttatatttgaatggagttgtaatggaactagttgagtatctggccagtaactcaacatgtctgaatagagactactttagaaaagaatggtcttcccaggtaacatgtcttagcttgcctgcttagtaaaaacaacatgagaatcagaggcagttctgaatcctagtgtttgactaggaaacagtcaaacacaaaaacatgggtctgatggcatcagaataaagtgaaatgtacattcctggtctcatagtcagcaaaaagagccttcccgttagtgaatcagttactgcctctgctatagtcctgaaagaaagacctgtagagacagaagcagccccttcaatcatttcagcttatcaaaacattttgttttggggcctttatagggcaaagttgggaaatggttctacagatccatgactgagatctttgtttcaatctttgataagagttacagattttatgaggttattagagaatttctttcactagaatgtgccaagaattagattggataaatgtactgggagagatctggagaagaaaattctaaagaaaatgaagccagtcatcaatatttaaaaaaatattctttccctccatgcatacatacgtatatgtatatgtacatgtatatataaatgtatttgctaatatgtgttttcaggcttgccttttttgaactcaactaccagttccgtacaacatctgaactgcaatctgaagtaataagacactattcaaaacaggttagtgtaagattgccttacaaagtcatggaaatatataagctagtcaaaccttatgtatgtccatgcatgttgtactataaatttatcaggaaagcaaatagcaagttttaaaattttaaacattttttccccctcagattttcagatttattcacatgaacttcagcccaaccaccattttatttttttgtccttgttcttaaaaaacatttagtatttttttctgaatcagtgtggattagaaacacatagattattaataacatgttaatttattatacttagtttcttgaaactgtcaattactgatgagcacaaatatttttagtgtggagttactgagtcagctacacaccttgtttttgtgggtcttttcaactctagagagattcctctatgtcaggatttgtgcttgagttctggacatgcatcccacctttttggtttttcaagacagggtttctctgtgtagctttagagcctatcctggcactcactctggagaccaggctggcctcgaactcacagagatccgcctgcctctgcctcccaggtgctgggattaaaggcatgcgccaccagcacccggcttgcatcccacttttgccatgtactttgtgacactgggaaatctataaggtgctgatagtagtaactcaaaagtaatgcaacactgaagactttttctgtattctagaatctagagtttcattcacagtaaggccaagttgctttgcaaaacctaagtatagtaggctgtctgaaatggctcagtcactgaagtgcttgccttgcaagtttgataacctgagtttgagccccagaacccatatgaaaatgccaggtatgctaatatgtacttataatcccagcactgagtagtcagagaccagatcactggggtttacacgccatcattctaggcttataagaccctgtctcatggaagaatgatagtgttcctcgagatgatacctgaggttgaaatctgccttctacagttacccaaatacagtatgcacttccacacacattacacaagtatgtatttttaaaaataataattatatttttaaatgaatactagacataaggaggctggagaacacttgctgctcttccagaggactgtggttttattctcaggccccacagccttctgtaaccccaggcccaggggatctaacaccctcttcttgtctcttagggcactgcttgcatgtggtacaccaacatgtatgcaggcaaaacacccatacacataaaataaaatgaaaacaaaaggaataatgataagctttgggccttgtaatttgtagtaaatatgttagcctgagcaaactggatgtataaggatgtatagtagtctcatgatgttaattgatactcatatttcatttttaggctattaagcaaatgtatgtacttattcttggacttgatgttttgggaaatccctttggcctaattagagagttttcagaaggcgtggaagcatttttttatgaaccttaccaggtaaaatatttatctttgtattatgtaatgaataatataatgcaatgatttcttaatttataaaacattgcaattgttaacttgagctgtacatgtaacaaattttgagacccacaaaattacacctttctaccttttccttcaaaatttcaacttaagattttgttaagatccctaactttaagagttgttttgaagtaaaaactgtgaatacagtttagactgtaggaaaaggaagttctcaacatgtatgataattttgttttgcacaaaagtatgactgtaaaaataaccatataagttgtcattgtgcatagcagtcttaaggaatagaaaagaagaatttgttctacatcttttcataatttccataagcacatttagagtttacccatttatgaaatgcataactaaaacaaagtagaactaatttttgttctgtacgtgtgatataaaatcagaaatggtaaaaattttcaattttatttttctaaaaatatatcaagaatactatgtaaactgtgcatgcagtttacagtgcaaacatcttttctgttctcctttcttcatctggaaccagttctgttgtaccctttagactttgagtgtcatgaaattactctgagaactgaatgtgaagtttttgctggtatcattccctttgttctttcagttgccatcacattccatatatcagtgagctcatccttttattaccactctttctgtcaccttagggggccatccagggtcctgaggagtttgtggaaggaatggcactaggactgaaagcactggttggcggagcagttggtaagcagcagaaagcacagtggcactgctagaaaccaatgacagttgagccttctcttaacatattactctgtctgttaggtgggctagctggtgctgcctccaaaatcaccagcgctatggctaaaggggtagcagccatgacgatggatgaagactaccagcagaagagaagagaagcgatgaataagcaaccagctggccttagagaaggcattactcgtggaggaaaaggcctggtttctgtaagaaatttcatagggttatgaacttgtgagggaatagcttttaaaccaacattttatgaataaagaagtaggcatgtaagtctatttaaattgcttttgaatattgtaatgtggcatataaaataattaatctccaaaaagattttgttgaaataaaatacttaggaaataagtatgttaattattgtcgtctaaaagaagaaaaaacttgaaatttttttgaagcaacatggtcttgtaagcatcatatggaaatgtaacttttcaaatgtgctttccctccagggttttgtaagtggcattacagggattgttacaaaaccaattaaaggcaagtattgtagttgttttggctgtcacatagctcacaagttgcttctattttcatttgatccaattgcttaaattggctatgttttataggtgctcaaaaggaaggagcagcaggtttcttcaaaggtgttgggaaaggtttagttggagcagtggcaagaccaacaggtggcatcatagacatggccagcagtacctttcaggggatcaaaaggtaaaaactgtttgtgagtgacagatgactaatatactgaagccatgaacaatgaagtgtatctactattgattttcaggctcttagttaggaattctgtggtatggcatatagcttcctaattttgattcctcctaagttattatgcgacttcagcattgtagagttctcctttgtaatctgttcctagcagttgttgtcatgaatgaccccttttctgatattcattattttccattttgcccaggattcaccacccctccccccaaaacactgcactacaaggattctagttctttgtataaagtagatgcacattcccttttcagaaaagcctttgatccccattggataccctcagatgagtaggtgaagatgccataacattttgagcttggcggttgaggtagtgactgaatgaccagaggtaaaagattagggctagataagtgtgggaaagcaagaaggggcatacaagggaagtacaggacactgactcattggattaggtttcccctccccagacatcgaacacctgtaagtgattatataataatatattaattccattggagagttagcaaaattgtagatcctaaaaccatgacagaaatatttctgttatgagcaggaaactagccacagattaactggattatatacttcaacatgagggtgataaatttcccttcaagtaacattgactgaggaaagttacatccccaaactcatggaaagacaaatccatctactcagtcagtcacttccttcttttctgttcttttataaaatagtcctgacaaaagcaaccgaaggagggaagggtttctttggctctgtcatggcacattcacgaagcagacatttgtcaccagtacagagcaggatttcttatgtcttttgaccttgatatgcttccttatagaattttttgatttttgtctggtcctggccttcctcacctgtgctcagtgcatgctttttaagtataaagtagtatcttatttgtttaatggcatatgatggtgaacatccatgtggtttttggtctcgtgtatctcccacttaaaaaaaataatgttttctgattatcactacaaataaatttcaaggggattgatttttttaatagttttatatttttctggaaaatttacattaattgtatcataaaaacatttaaaatagagaaattatatggtattcttatctaagattattttacttttattattttattaagattattttagtaattgttttatactgttttaagaggtttttgataatgttttaattgagatagctaccctccctcaagctccttccatgccccctactgtcaagttgataacttctttttctttgattgtatttttttcatacatatgtatatgtatggaacaaataaatataaatagaacttattcagttatttgtatgtatatggttttaaggctgagcactctgtatggataaccaataaaaggggcttatccctgggaaaggttaattttcctcccagcagtcccctgctgtcaatagttgtctgtaattctttgtctaggagtgggaccccctgagaaatctttcctcttccatgttaagtccattgaaactgccattgttccagtctttttacagcagtttctaggagatactgtgtcacacagtagactttcgatgttctgactcttacattctttccatatctccttccatgatgtttactgagccatatgtgcaggcttttgataatttttaaaatgtgtgtgtgtgtgtgtgtttgtgtgtgtgtaaattttattttattttattttttagagctacagagacttttgaagtagaaagtctgagacctcctcggttctttaatgaagatggagttatccgaccttacaggctgagggatggtacaggaaatcaaatgttacaggtaagtgaagaaatgtcccacaaactaaatcaaatatcacaacttagggtgtttcaaaatagttacacaatactttaaaaataaattaggcttttatttatcttatttagctttatttatacttaggctttaaagtacatttatttactataagatttttttttcttttttacaggcctcaaaaagtttgatatgaaaactgttaatgcatgactttgcaagtgaaagccaacactagattttagtcttaaacttttacaaactctgtgcagctgtttcaatatttgaatataaagaaaagattttgtatgggtaacttatgttaggatgtgagtcaatctaacctttccatagactattcttggttctgctttgggtattctagatctggtgaaaaccaatatgccttgtttgcctttagcattgatagtacttacttagttagttaggtttttctgtttggggtatttcttctttgatatcactgctagtttttatattaatataatcatcatttcaaatttattgatgaaggaaggaaaagcaaaactcaggaacactgccactgtagatcatcggtggttcttaagcatttttgagaatgtcatgttagtatgtgtagagcctcgtgggatttgatgcacagttgcagcaagcagtgtcttttagtaaggaaatacaatttgggggacagtagtctgaggctggaatgatttgtcagttcagacaacttcattccttgataactcaagttttaaaacttagattatggtagaagtagcagatcataccccaggccatcctgttgtaaagttgtttggtgtttcaaataaaataagccatttatttgaaaataaggagttggcgtttttatagttttgaaaatattcgtgataataataaactgttgaaacatggagcttctcaagtttaaaatagccagggtaaaaatttaaaacttttactattttactactacatgtagagtatatattatttcattaagtgtactttatgtcttctctggatcttctattcagtgttagaatgtaactatagcattgaaatatagtaaagtaactcttaccttgaattttaatcttattaacatgccaaaatactgcagattacaatagaattggcagtctcttgggaggttggacctaaaggacatgttctgcaatctctacaagatcctattgttctttagagacataaatgttgtagacattaacctctggctaatccagttgaagcatttccaccctatatatgccttcctcttttaaagaagaattaacatgttaactttttactatctgaaagttgaatagtttgcaaaacataattagaaaataagaatattactcaagaactatttaatacagttgcttacaaaatagggatttgtagtgaggagaatttaaaaataaactatcctcattatccaggaacagattataccgaaagtttctcatgattgataattggatttcattggcaaggaagtttattccacacctcttttgaatttaaaaccatgaatttctactcatatttaaacatacatatatttttaggagaccagtctttgctgaaggttctgtttctgtaaataaaatctcatgatctttgtcagatttgtatatttttcagcaagagtgttaaattattaacttgaatacttacaaaaagtttataagctgtcttggaatatttacagttagcattgtttgtttacagatgtaaaaagttagttctgatagtaatagtgcttttctaaaataaaactgctatatttttagcacatttgttaaaatactatataatataatacagaataaaagtggtaggtttcttctatagcaaacaggaatccctaaatttgatcctgagcactgcctaatccagcatggcggtgcatgcctgtaatccattggttgggaggtggaggcaggaggatcagaatttcaaggtcttcttaaactacatagcaagtttgaggtcaacctgggataatgagacaccctgtcttaaaacatgggaatgtaatctgcctagatttcacctaaatgatttaatgacagagctttataagatgcttgttacttcctagtttctaatgtttatacttttttctgtgtttctacaaaaaagggttatctgtgttgactaactgacatatgcttatgcataatagttagatataaaaaatattcattttatgccattctatctaaaaagtaggatattattatttcattgcttcctagaggtcaattaaatgacttgtgaagaagtagaatactcttaatatattcctaaaacaccttattgataaatgaaaccatgtctgacatgagtgtatatgtggaagttacttttaagcctgttaagttataaagtattatatccatagttacagcatgaatcacagatgaaaactctgctttaaaattactataacacctaaacatttcataattttaacatgttttccctgcagttttccatacttaactaacctttatgcttctttttcctttaccatgctgacagaaaattcaggcctacagggaatggattatgactcacagtaacagtagtgatgaggaggaagagtcttagctagggcccaattgttaaagttcatatgctccttatcatttcattggaatgtttgtgtgactgctgtcatcacacccatatgtccatttttaggaacattaagactgtttccttataaaatgtgttctgaacatcatgatggaacaaagtaacttatttacacacaggaaaatgtatttatcagtcaaagtgtagagtatatcatatattataaatttactttgatataagctttgtattgcacagtttgtcattaagatctgaaactagacttaaatgaggttttaatgttcatgagttctactctaaattaactgcctggtagcaaaacacctttttaaaataaaaatgtcatatgaattttctgggctgtaatggaataccattgttacaagaaacacaagtgggagagaggaagaacaggagtaccgtttaatgttttgtatgtatttagcacttgaaagtattttttgtcgaatttcttttcataataaacatacacaacttgaagctgtgtggatttgttctattccagaatcatctaactattatataaaaatccataatttgtcatagaagattagttatgagtataatataaaagtctttaatagttattttattattgcttatttccttgtatacttctgaaacagtgaacaaagtttattgaacagtcatttattatctaatgtacatatttatatattgtatctctattaaaatatagactaattcagaacaatagaatttgcataataaattataaatttagacatttttctgaatgtaataaataaagagtatctttgtctctgagttttacaagcaaatctattttatgtttgggtactaaatttttattttaagcaaatataattatcttgtcctactttgaaagactattagatgtggtaataacaacaaaaaacaaatgccctaaaatggtgaattattagtagtctttgtaatgcttaatcacttctgactgctatgtcttttgatcagtaaaggaataaggagtatttaccttaacttacagtaaacactttacttatattgaacttacattaggttgaatgagataattttctaatttttgaggtttcttttcaactcatgctttgatttctgcatttaatttttgcacttaccaagttttcattcctataaaccattatctcctatgctctttgaaaatggccatcttgcaatagcagagaacgacagctagctagtaatcacctctttggagatttgtcttttccagcatttggtcacattaaaacaaaaatcaagggcatgtagagctagccctaaaaataagcaaatgtcaaagaatttgttgtttttattacattaatgctcttgaaaatatgtagattaaaatagtgactataaaataatgaccactaaatcacactgaatttgtcttacacctactgttttctaacccgtggccaacatcacaaaactacctcttctgctaaaagctggaagaacacagttgtcatactgtgtgtacataaggaaggaaaggtagaaaaatgtcttgatttcgggtgttgtaaagcataaaacctttctcaaacagaaagtgccaaaatcttggtttgcaagacattttctgagttttcctgtggtgaatacctgatgcctatttctgtagtcccaaattcatggaaatgttcttaactattaagaatttattggactggaaatgcgtctcagaagttaagagtgcttctatcagtcccgagttcaattctcagcagccacatggcagctcacaaccatctataatgatatctggtgtcctcttctggcctgcagaccaaacactgtatacataataaataaatctttaaaaaaaattatctagaaaaatgttctgattattttggcagtggcttgccattttaattaaaagaattagaagtagaatcatatttatttaaatcttttcaacagtaagatcatgacagtcatgtgtaagttttattgagtgttcgtgggggttcctcattacttggtttagcccttaggagtatcatatgtccttagcaatgtaattgccccttcctggttttctgccaccattgaacattttaaaacatctttaaccacaagtactaattggttttccagttttgctttttaaaaagcactgcttttatcagagaaaagtttcacactgaaaattgctctgttgttttgtactgttgtcatcttggttcaagtatagaattggagacaagtactttattgttctgcacctacccaaaggacagaaaaagagttcacatttgagagtcttatgatgtaaatagttcctttctttatttatgactatacttagcaaggttttaaatggtgtctgtctaataaggaagtctgtggaaaagcaatatttggaacttattttgtagtagtgtacctttttatgtagtttaactttatattctaaatttctacatgatctttgcttgtgtgtgtaaagtaggaatagtttctcttccctgagtaattactattgggaattctttatttctaattgtttctcccttgtacttgaataacatactgaaatctggcaaaatgaaaaaaattctaaaattgcatgcatcataatcatgtgtaattggctaaatttctaagagcttttgaacgaaatcagttagcactcacgttatagttagataaatagaaatccagaatagcattagctttaatattcatttgaaccaagaaaccaaaataaatcttaatttagtcaaacccttataaatttcagccttgggacctgccaagatgtcttagtgactaaaggcacttgctgccaaccctgatgacctaagtttgataactggaacccacatggtgtgtcctctgatttctatacatgtacctgggcctacacagaaacacataggtagacacacacacacaagcaaataataaactttagcttttttgaaatcattaaaaatatttttcattgatgtttgttttaaggtcatgttataaaatgtacaaactagagccttgtagatgccttttgactgtggcatttcatacatgatatgaaaatattgtatttatgtctcagtcatgtacattgaagaatattactatcattgctactattttgtctaacttaaattatatggtaaaaattcgatatttaacttggttatactaatggaaagaaggtcaaaaccagctaccctgttactgagtctttttctgctgcatcttcaactgcatctcagttttgttataaatttccttggaaatgaatgtatcctagcctccaaatattaaagacccaagagttttaaataaaatgttatcaagtacagacatttagataagtaatgatgatcatgtaagaagaatgcctggtttattcatgattctcaactagctcctttgtaataaatgaggtcaattaaaaacatgtacacttaatttaatctaagttcagtgaatgaagaagtaaaaagcatcataggaaattttgaatcaaaagataataataaagtacatgagtcagaataggtctgaaatagaaaacagagtaatttatggttgtcatgagtttatggttttagtttaatgtggtaaagcattttcatatccatgattatttctcagtaatggtaaagtcggtgtggaggatatttagcaattattctctgtagtgtgccttccaatatcagcaaatgtataatgcttctgtaatactggattttaatgtagttctcaatacttatgcatattataaatgtgaaataacaacaaggaatctctcttaattgagctatgtcattcttgaggatcttatgtggtgttcaaaatttaagccagaaaatagtagatagtatgtttttaaaaatcatattataaattgtatttatcaataatctgttacctatattatatctacaaaaattttcttaccatattgaataaaacttgccaattctatgaatattcagtcttagagactctaaccaggtgagaggcatcagagcctatgtagtcacagcgctcaggaggccagcctggctaatgaatgagctctggactcactcttgattcaaaaataccaggctggtaggtaggagattcaattatattaataggttctttatgtgtaactgaacctataaagcccaaagtcctgctcatgaatgatttcaccaacattgattctgatgtaaaactgtatttaataattgatatagaaacattcaaaaattatgttttcacatttgttaaaataatctttgttcattaaagacaattgggggatgggtaaatagctcagtgggtaaaggtgctggttgcacaggctggcaacctgagtacagacacctagaacccacagaaaagctagagacagcagtgcaaatctggcatgactcaacaaggtggcataaagacctgtgttaagcaaggcagaatgacaaaagcaataccttgaaagtgtcttctggtctccacacacaccatggcacttgtccctcccccagacagtatgtgaacacacttctaaagtaagaattgacagaaaaaggttatcatttgtattcttaaccatatatgggttatttcctttttaacatttttattcatagagttatgatttagatgcatgaattctatttaatttttatattacaaacttttataagcaagattattaacttctaaagattaaaaaaaaattctactcattgtgtaattcccacatgtgaaacacctagacttaatacttaaagacacaaatggccatttgacatttctgttttcctttttcgttgaatgtattttcaccttttaacatttcttgttctaaaaaaaatttcttccccttaaaattaaatctcctgaactgtatctgtgagagtgcctgtgagagttccattgtatataagcattgagagctgagttgtcccaggacaatagcatgttctttactatttcaagtgtttttaatttgatccatattgtctttgaattctttacagagttataatagttgctattgtgctagttgtaggagggagactgcttttgtttgttgtcttttctttcagaaattacaggtgtttaattagcttcaaaccctgccttgctagccatggaggataactaccttcagcatcgtggtctttcattttacttcaggaagagaaggacagtttatctggaaaaaagggcttaaaaatagcagtcagaccacagaatagtactggacactcttcttctggcttcatctaaagttttgagtaagtggacaagaagtaggagacatagcttatttaattcccactcttcattttgtaactttccctctccagaaaaatacttctgaatggaaggagaaaactgaagatagccacatttatttatttatatgcaaattttaatttatagtgcctcagaaaaagcagagcttgtgggaagggcactgtctctcttggatggattctgattactactctagcagattctttgtcacaccaagtgatggtaaaaagtactttctgaacaagactttgaagttatttgtgtcttcttctgaagtgatggctctccttaggaattgttccacttttgttcatattaattgaaaatttattaattaaaattacctttttaaatccagaaagtaaaataagactatttgacttctaaataatttttaaaatttgttaccactacagttgttacatttgtaaatataatagtaggtaaatagcattataatagaaattcagtacatattcatatttttagacccttgaatattaagctcagataggctccatttgaactttaccctcttttttttaaccaaggagaatatgaatataacacacacacacacacacacacacacacacacacacacacacacacacacacacacacacacacacacacacggttaaacactagagtaagtgctagtttagaaaatcttcagctctaattaagctaattgtgctaaattttgaggccaggtttacagcccatgaagccactatttacttgctagaactttgccttttattccctagtttctgtgaacagattctcacatgggggaagctaccagtgttctggttataagagcactaatattatgaaaggtatttttgtttactgaataaaataatttttatatgggcctcttttattcatttcaaattttttcatatgtgagaagaaataccattttttttatttttcagttaagtctttaagagtcaaatgatactttacaaagtggtactggtgtcttagtcacttctgataattctaatggattatgtaacaacctaccacatacaggaaccttttggaagtactgttgagaaatacacacttaaatatgtctgaggcagttactgtcattagagatgtagtgtagtcaatacaaggatgagagactggatatttcatgtgaaattaacttttctggattaaattgctaagctactctgaatcttagactttctcaaacaaacaaacaaaagatgctacttacatataattggatttttctcagcctgatttggggccatggtttatgttaaactacaaaccatggttttaattgctgttcgtttgtctttgttgaatccctgttactagtatcttagggttttggtttttggtttttggttgttttttgttttgttttgtttttttgcttttgtttccttgaaagaaattggggttacagtgcttaagacagtagttaagtttcactcatccctcataaacttaataatttaagtgatagggattaagtgcataccatggtagaggctagctttatagcatacggtccctcacactcccccttcctcactgaaatgcaaggctctacagaactacaggaactgagcaaaaagtacccatctcaagagaattttcccagatacttacaaactcaaaactaaagagacctttctgaatttgtagggtatctaagctatattttagtgaattgcccaaatgagattccatagcatctgctgtaatatctgtaaaatacataaagtcatccctcaatatctacaggggattggttctaggaccctcagggatacctaaacctctagatgcatatgtgtaatatcaaagtatttacatggagtataattatattctcctgtatattttaaatcatctgcagattacttataatcccaaattctatataagtgcattgtaaataattgcagtttttaaaaaatacttagaatcccaaggatgactgggtgctgaaaccacaaacagaaggttaactgtagtgctgtggttactcattttgatattaaaaattgttacttgagatatagcaagaccttgtgggtcaaggcttggattcttgaaccatttaaccttaatttagttttaactttactaactttaatcgtttgatgcctgtgtgacctctgttccaaaaatggatataatttgtagtttcacttgtcttgatattgttgttaggattaaaacaagtaagatagtagatgtgattattattagtatgcctaataagaactctattgtatttttattattccagatgaataccaatttatgctagctcttggccaccattaataaactatgtattcctcatttgtctcctctttgccaagataaaagcatcattaaatctcatcctttttctttcctttcaaggttagtagaatagttataataccatgataatttctacatactaattgttgaacatagaaacaataaactcatttggactgtttcttattatacagtattggaagagaaatgctattgttatttcaagtatgtataggagggatagataaatactgatgcgtagatgtcctgcttgaaattctttagtaactgcacttctttatatccatgcacacacactatttttagactgtgttaggtgggctagtagtcggctgggagcataattctttgctttctccagtctctttttttggctgcactagttgaaaagagttcacatctcctgagatttaacttcttcacttgattttatagaatagggttatactcagctttcttacataagctgccaccatacctatgtttatgcttcagctggcagtcaggatagctcatggcatatgaatagacaaaggtatggggcttaaatactttcccttcaaacctaatgacaaagcattaagattggacattttaactgccttgcctttctgttcattgtgtaagaaagcactgagctttgaggtttttgctcctactatggttcattacaaagcttgattgataccttctttaatcatggatttaagttgcaactaaaatgacttagtaaaacttttttaaattgctaaatgcttaataattcttaacaattgtaatagttactccaattttctgaaaagatacagttcctgcacagcatccagttgcctgtgtctttctccctgttccttcccctccctccctctccattctttcctgggacagtcttactatgtagtagaggctggaacttgtgaggaaactcaggttaacgtgcatcatccttttaagtgctagtattacagatgtacaccacctggctcattttaattacacatgttactatctttattatgtatttacttatttaggttttttaaggcagggtctctttgtgtagttcttggtgtccagaactcactgtgtaaactgggctggtctcaaattcacggagatctgcttgcctctgcctgccatttttccaagtgttggtattaaaggcatgtgccaccattcctgtctcacatgttgtgtatttaaaaaccaaaacacaaatctcatacaactaagaaacactgttctaggagagacatgtattttgatcatattttaacttggagtagatttattcatttatgtttagtaaagtaccataggagcttgtctttttccaaattcagacaggaactgtttaccaataaccatgtgaaatgttgcctacagattgtttcttacacagtgaatgcagttttagttgtttctatttcttttataaactcccttaatgataagtaattcatatatactattaatgaataaagcaaaattgtttttcatttatcactgcactacataaaaataagggtcacatgtcctaaaggtactggttattgttaagtccttggtacttcagccaaatatttggtgtataaagcttccatatattgatgcctaacctttattgtactcattcttttattttacatggtatctgaagttagtgtagtgcaaactttcaaaattatgatatatttagaataaaaacgttgtggaattttgacctgttgatctaaaatagtcacctaaattcaactgcttaacagcttgcctccataactggcatctgccaggtttatcaaagacatttttaaggtagcacagagaaagtgtgactgacactctaagaagggccatgtcacagtgaaaaatacgcattaatggtccagaaagtcatagtgttctaagccatgtttgtggttaatcccaagataatcagttagctgtaatgtcactacacaactgtggagggtgaaacacctgatcctcagtatgtagattgtgttggatgaacaattacattttcgtcagagtcggagttttgatggtatttagaagtgcataaatcttcatatagaatgtgtttacaaagtcaaataatgagccagaaaattgtgactaaaagtgcatttctagactgcaatgtggttagtaacctatcaaattctctcctatgcttctgcaactttagattcaaagttttagactctgcctacaccgtgcttactcagtttcacaggttgataatgaaagtacctgtcaagctataaatgcatggtgactatttattcagagatatcaactgtaataacagggacatggtttatgtttggaaacatactgttatcagaatgtccatttgttttttccaacgttgcatatgaagaattaacagagaacattgcaccatttacatttgtaaaagatttgtgacttgcttatattagatgctgttgtgactattgaaattggtttaattatcaggcacagcttagaattgttttgtcttaagtgaaaaacaatgaaagattcgactgcaataccctgtctcgagactgacatggaagatactgggagctgaacactggctttatgtgttttgaaggttatactttattaatgagctgtatagacttttgacttttatactgtggtctgaagaaaatcagtatttgtattcttggtttcagaatttggccataaaaacgaggagaacactttcataagcttatttatttcagatgaaagacaaattgaattaaagtgtgtatagtgtatatagtaagatgaactacttctgctgtcatcagtactctgcccaagcccagacaaagaggaaagggaaagaataagtaaaagaaggaaaagaggtacatggggtcctcacaatgagtgataatatccaaaaataatgtgtatattttcactttcaaatttttcatcaataaaataactgctgggcttggtggtacacctgaggcaggagaattgggagtttgaggtcagccagcattgcaaagtagaacttcatctcagagctttgtagctttatcagataggttgtacataatagataatttttctttaccactgtgaaaagggtttattttccttccatgttgaaatgagttaccaagtttttcagatatactactatctgaaaataccttctactcctcctctgtaaaatttgatgctgctttctcttggcttgcatttatctgtttcatctaagttttcaaatatacttacatagtttataaattaataatcctcactaagttcttctcaatctgtgactatttcccttcactttgtgtttaactgttctacatattgcaatgtagaataaagatgttttccataatattttataatctcgaagttaaaaaatgtgcatgtcagttacttccatgaaagtaatctgtttgcctcaccctgcttcctggtgttttatttgcttcctttgccaataaaggtataaaggtgaatactctcctcctagtcttcatcttggtacaaaagactaagaggagagtattcaccaagatgcttaggaagtcacaacgttttttctaaactaaatgatttttttttaatgttgcttcataggatgcaggggttttttagctatttaagatctcttggaatttctctccatagctcctaatatgcctaaattttctccccaccccccttgggtttttcaagccagggttcttctgtgtgacaactctgactgtcctgaatctcactttgtagaccaggctagtctcgatctcacagagatcacctgcttctgccaccattgtgctggattaaaggtgtgcgccaccactccagattcctaaattcttcatatgcaccgttttttagtattcttagtcacaaattttacattacttgccttcaaaagatagtctgcttttattttaaatatccaaggtacttgcatcctaaaaaaataatgttgaaataaataataactatatgtatagttacatttgtattttctagagcaaagaattgttaacaaatgttaacagtcctggaagtgaacttacacattgttagtaggctttgggtttgtccagaaactctgcttcatgttttgttagtcagttatgagactggcaaaatgatttttaaaaacagaaaggaacctgttatttcctagtaattcctacatttaaatgtgtatacttacatgtttctgtacaagtgtgataggattcaaagataaaatgtctaggatgttttaatccctagtagattgagtttgaacatgtaagctaacatcttctaaaagcctactacttaaaaactgtcatttctatatttgtgtaatctcaaatcagtgtgataaacacttttacaaagaaaataaacaacaatttcatgcatatttaattcaatttgtatgtgtagttactatattaagaatgttaatgatttgcctccactacaaaattttttgagaataataaaatggaatatttcaattttattattcttttttataggtcatggaaaatggaagatttgcaaaatacaagtattttacccatgtcatgatcaataaaacagatatgttcatgataacaagacggtaacttcttttccttctctaatataattgataagggtgacaggttcatcatttccatatagccacactgattgctataaattctggtcatacgtttaagttcagttttgtgtatgcttgtagataaacacaatcataaataaacagaattataagttagtatttcagctatttttggggggtatggaaattgtgtagagctgacctctcaggtagactttgccctctaaatatcactcaggttattccagaagtcagcagtcttcgtaatggcatttcttcataagaatgcagaagtttactgtcgtaactgggtacaccaatgtgagtaggacaagatactcccagctatgacatcttcagaaaagcctgtagacttaaggaccaatgggtgtttttcagcatctccagcaatctcagactggtgtacatgactgagagcaagggcctttctggcttgtgtctcagccacatgccatttataaatcagtttctgaaagtgtgtgctatcagtttaaaattggtgtctcaactacaaagagcatctgtggggaaatggcctttgaatgaaggattaagtagaatcatagatgaaatgcatttttcttatttccccctatgaagccgcagatgttgtatttttttaatttctctctgattttgacaatgacaggacttgatttttccctggaaacccccaaagattttcaatatgttgattctgttcagtgttgttagaaaagcctctttctggtggcgggtgcaaagtatattattgtaacatgttacatgttcttgaatattttctggtaattggttctgtaaatgcttaccattccttaaaaagagctctatttattatgacttcagctcagtttttctagtataggtcatgctgtacatttcccactgagcattgcttcagctacatcctacagatgttatagtttcattctcacactattacagttgtttttcccatttgagattctttaactcatagcttgttttagaaatgcctttgtttccaaacattggggagtattgtcattttttcatctttctgttaaccagtttctaattttggtccattgtgttcaaaaaacagatacttttatggtttctattgtcttaaatttgtctcttttgggtttttgttgttgttgttgttgttgatgtttgtggtactgggaatcaagtcatggccacatactttttagggaatcagtttaccattaagccatacctcaagctctaaattcattaaggttttttgtggggctatagaatggcttggctgttaagaatacttgctgtccttggagaagatccaagtttagttcccagcatctatatgggctggtgcacagttgatagaggaatgtccttttgtatgctgtgaatatatgtttctcttattgcttgatgaataaagctgttttaaccaatggacagacaggatatagccaagcaggaagtataggcagggctaccagactaggaagatgctgggaagagggacatagggagtgagtctcaaggagatgccatgtagctaccaggaagataggatgcctgggcattctgtggtaagataaggccacatggagatacacagattaatagttatcagctaataattgagagagctaggcaataagaagcctgagccaccagccagacactagacagctgcaggtccccgtaagatagaaacatccgtctacacacagtcacctataactctggttccaggggattccatggcctcttcaggcctctctggggacctgcacacatgtacacatacatacacattacattttttttgaaaaataagattttaatatgacttagtatctatatgactattccatgtgtgcttgccaaaaaataaaaactaaacataaatcttgtgttgttgacataagttcctcaattctcaaaatgaatcctttcgtccccttcccctagtggtgtgttgtttgtaacaaaaggaacatttgggcagctgacatgtgaatggcagtatacttttgatgaatttaccaaagagccatttattgtccatggaagaagattgcgcattgaagcaaaggtatgtagaacagactgttttgatatttatatttctctaatagtgcactaaagttgactctttgatttgttttttatgaatgctgctctgtctcaggatagcttccctgagacaatgtaattgtagcatctgtaagggggagaagtcatttctttattgtatttcagcaattgggttttctttttaatgaagttatgaattctgtttataggaacgggtgaaatctgtattccatgccaaagaatttggaaaaataattaacttcaagactccagaggatgctagggtaaatataattaatcttttatttaaaccacatagaagcatctcactttgaagccatgttttgcagcaggtaaattttgtttagggcttttgtttttaacagctttagtacatataattaatgatattttcttcaaacatttttcaatatatccaacagtctggcttttcaaatcaaattgctcttcattttttgagacagggtctcaatataaagtctaggatatcctagaacccaccattttcctgcttcggtctcttaagagctgaaattacaggttttggcatgttttgttaagtgctaactgtcatacaaacaccaagaatcattctgttctagtgttaatctgtccactccagcagagaaagtgtaactaactctgtattgctaacttccttactgcacagttgcagtggtgtaacaaaacaagtaagaaaccaaggctgtagtcagaaagggtaggtttcaatatttcctctctcactcactagtagaacttagtgggaagtcatttaaccccagtttctttgaaatgggaatggtctaaactagagagcagtgaacatgctttggggatcacggcaattataagaaaatgaagcctatgaacttacatcacattaatcatagctaagacactgttcttgataaagcattgtactgtttagggtaactcattttaagagcactggacctttcacttcatccctgtgcctcctgccttcttatattgtccatcaaatatgactaccagtgtggacagaggtttctgtccatctggtcccacagccaccaaataaacacacagaggcttatattaattataaattgtttggccgatagctcaggcttcttattggctagtgctcttgtaattattaacccctttctattaaactatgtattgtcatgaggctgtggcttacctgtaatactcttgttactcctttgcctgctacatggcgtctccctctggtgactgcttctctgcctttcctcttcccagaattctcctagtctggtagccctgcctgtatatcctgcctggctactggccaaccagcatttattcatcagccaataagaggaatatatattcacagcatgcagaaggacttcccccatcataccagttcacttgtcacatctagactctgattgctctcctcctacatgccttggaccagttagggtatgctatgcaatttctatcaaggtagtgtgattaaaggcaacattgacatactaatcataggaaaggggaatgaattaccaaaaaacgtggactaaaaacactgaaatgtttcttccaggaactaggagacagaatagaatatgctaactgggcttttctttgaggatagactttttactgtttcaatttcattaaattttggggctgttttgtgtgtgagcaaatgtgtgtctcagtcttggcaaggtgcttgtatctagaatttgttcattaccaatattttggcacttagctattcataataatctgatgatctttatttctgtggtgtcattttgtagtgtcatttctggttctgagtctttttattccagccaagaggattgtctcatttgtttatcttttcagagagttacagcttcattggtttattggtctccttgtcatttatttgttttgattcttactctttcccctaatttggagtttggtttgttgttttcctagttccttaaagcacagtgaaatggtttattctctgtgcctgttgctttgattaaattctactctctctacaatttttcttctaaagttgttttctttttttttttggttttttttttttggggggggcggttctagacagggtttctctgtgtagatttggagcctatcctggcactcgctctggagaccaggctggcctcgaactcacagagatccgcctgcctctgcctcccaaatgcttggattaaaggcgtgcaccaccaacgcccggccctaaagttggttttctataagtatggctactcctgatttcttctgcattccatttgcatgggatatcttattagtcccttcacttttagttcatatttgtccttagagataaatgcatttcttataaatcacatattaagtttgggtttggggttatatgggttcttaatctagtcaattatgctgtcttttacttggaatatttaatccacttatattccacataattattcataggtgaggtcttaatgcagcccatgtagaacttgagtttaactctgtcttggccttgccctgttccccagcaggtggtatcttgctctgtgctctgctgcctggaattaggagagggtggtaattgtaatcagcctcttagcttagttccattggcccagtgaccaggagttggttggggtttcactgtggcatggcatggctggatttcaaatctaagacctgtgcttaatcaactgccttgcccctccggggagggagggggcaggaaggggggacatccttccatgctgatttgcttgaggttgagttacagtgtgttatgaacaactcttaccttccttcttagatgtctttttgttctgacaactcaataagcaggatgtgatctcacctgatttccttagctcttgtgaaggcagtttgatacatttagtgaggagacagtcaccaaagcatctcatttagctaccttctaaatcttttggaaatggtacacaactatatcacagcttcactcatcaggctgatcccacaatcatagacattgttgatagaaaggtttgtattcatttcattttaataatttctagtcctttcagcataaaaaattatcatgagaggaataaaactgctcaaagatgttgctatgctactaccaactacaaaattgtaattgtttctactcaaactgaatacctatatgcagaactggtgcaagatggaaagagttttgcaaaactgacttttcagacaatgccagttatttaatcaccaaaatatcctttttctggcagactagttcattgtacttttcttattctcaagatgattctttaattcccaaagtgaacttctaattccaaggaccttagggaaatactattcctctgacatctgggctatgttggtgttctcttgtaccatatgtaggctattagctaacagtttgtctaaacttaatgttggcttttagatttccattcattctactttgtttaaacacaagttcattgaaattagtaagcattgctgtatttctccccaacagtggatccttacaaagctggaagaagcaagggaaccatctcctagccaatgaagagggaacactgcctggaggcacagcaatccaatactacagttcccatactgtaccttctaacccctgtggaaaataggagtcatttcagggagcatatgcttttagatgcttaaaaaaacaaaatcaatcaattgggcaaacagttgtgtgattaaactactagaaggtccattcagtttcctaatctggatcatgcatctgatatgattcttaatattttataaaaagaagtgtttactccaggatattctcagtaatggtagaaagcttgctcacagtgtccctgtcaaacaaagtatagtttctcagttaacattgtaaacttctctcatgtttactttgtctccctgtgtagtggaaaatgatcagattaagcactgcctcagtagtgacacagaaaactttggtaatttcttcagaatcatgaagttctttttaaaaaaaaaaaaaaaaaaaaatttcgtattttccttatttttcaaaaaaaatgatttggattatactaaaatgcatagtataactgaaaaacaatcttttttgagattggacataataccccttggatcacagacttaaaggctttaaaaactgagtatgatacccaaaaaggtaaagtccctccaggtctttatttagttccttggaaatacttcctcagggaaactccatggattaacccggtttgtgttgttaacagacagttgttttcaaagtaaaaaattaaagccttaataatgcttacctttgtttactggtaacaggaatttaaaaatacaaaaaaaagaaaaactttctaatatcttagctgtaatgaactgtgttcgagaataaagagttcacctcatgagttaaagtgcaaaccctaagacctaaccagtaatctatcctattgctttggattaagaatttgaggtttgcctactctgtagttattcaggtgataaacacttaaaaatacaggctcatcacttcatcactacaaaaattctgaactccatcatagtaaaaaaaaaaaaaaaaaagttacaggttttccccctttggttttttgtccaacatctttgctctttactattaatggactatttaaagtgaaacagaatgtcttaatcggttattgaataacacacagtgttcaatctatattgtgatgttaccaacttgttataaacttgtgatgaaatctaagagttcgtttggtcactgggtgtttaatctgcagggttgttaagcctcctgctttgctgtaaaagctagaatgaacagcatgtcagactgtaactgcagttgttgctgctactgttaccatctgatttcagagaacacattgattgtttttggtggcaccccaaatgctttctttgctaaatgtaacttgaatgaaaagatgacacatcacaaatttttgtagttgtgcatccccaagatgaccttcttcaaggtaaggtacaagctttctcttgctgagcgcctccaagtttgcaaattaaacctgtgaagagaagtcttagaaggttggtattgtctctgtatctggaatgttgctctcctggcatcccagtcatggccaacagttaactacctcattagttacttctttcatgagttcagaaaaattagattcctaattccccaggtttgccataataaagtgcaaaagtaatagttagcatagcaattctgtatcttctggcagttcgcaggatgggttttattactagtgcacatacatagctaatatgcctgtcctccttgttcctgcatcttcttgttctttatgaattgtggacccatcacctcctcccattactttctgactatgcagtaggaagacacaggttgttctatgtctaaacagtgaaaactaagaacattaaccaccgttaacatagatgagacattagcataacattttatagtttacggttacatgttttattcagtagtctttcagaatccagactcctttgagaaaaatcatcaaggaatcatagtgttcagatttctccagtagctttgctttcatagtgtttgtatttggggggggggtcttccataatttctttcacaatccatttttcaaataggtagcagcagtggtatcccagtgaatattactgtgccaatatctaatctctaagaagcacccacaagttggtgccccattcctaccaagtttaaaaaaaaacaaaaaaatactcaacattgaatttcctgtactttggtatcaccatgttgactcattctttagcctgtgccacttgctcccatgtataggcctctgcattaatcagatcaagacaaaaggcatgtgccgtatgtacttataggtgtctaaaactaacatacctgcctgtgtgcctgatctttgcttcttatctctgatgcaactaaaatcctcagtggcggtgtttttcaaattatagatcttaaccgttggttcgtgtctttaatagctaaagacaaccataattcaaaaatggaatagtaaagaaatacaagaacaagagaacacataggaacaaatgctctatttataatttaaaacgttagcactttgtagtgttaaatttttaaaaaatgaatacaaaaagcctgaaagactagggctatccataactgctggaactgtggccaggattagggccctgattcctgggaacagggtggtttaggttgtatatttcttaggtaatgaagaacagactcagagcacagtggtcatctttagggtgagaagtcaggagaactcttgttctagtgtatcgaatgtttcacttccctttcctcatagaagaccaatggaaccaggaaatgcataaaaattagctcagcagacgacacccaaaagaccacaggctgtggtagagccctgtctctacagggcatcttactcccatctgctttctgtctggctcatacatgtggcaaagatcctgaaaatcaggtagctaactatgtaggggacattattgtagaaccggagcacttacctgttgagggtgccatacaaataaatagaagtacattttaactaaaaatactgcatttcctcatttccattaagacctaagtagaaaaggaagactggattgaatctgatataagaaatccaaaagtacatccgtctgatttctgctggtgctgcatagaatcacatatcggtcctcactctggaaaagaaccctttgcctgttcctttgggtatatttttgaagtctatacttcattgttaatgctaacccacctcagtttacattagttagctaaattgtggtttttatgatctgttgtgtgtagcatggaggggtgagcattataaccaatagcatgattttccccactaatctagaaggaggtgcttggctaaatgagaagaggctgtgtcttactcagaagccccgttaatgtttcttcagttaaaactttttctactttattgcctcttttgtaaaataatctctttgtcatttaaaagtatgtttactttagcattatgggttcttgatttttttttcttaaacagtatagcttttttttttaaaaaaaagaggaaaattagagttacccaaagcttgacatataagaaatgtaacttcatattttataggtcaatatcaatattttttcaaaattgagtttttatacaaatacaaattttagtcgtagtttaatacctgctgtaatccatatcaaattgccttgatttaaaatctctgtcactgaacatatttctgtgatatcagtgctttcttctagtaaaatctttgtaacaaggacccttcacgaagctgttaaaaatgcctaatgcttataagtgttacctccagcagagtgatgaaagcctcagtatttatgatgtcctctaccaccactatttcaaagtcaccagtatttgggcagaaagcatttcagaaagcaacatactatagcttagaatagaatatcctcagtatcaatgaaaattccctcaagatcaccaataattataaattatatttagaacttgttagagcatatgtgtagaaagttttaaatgccatctctgtatacaagtgtaatacaattaacaaagttgttggggaaggtgtgctttaataaaaaataccttctcttcttagttttttaattgtacagttccatttttatgaaatgaccagactagtatcttaactatttttatattgctttaatagcctgtacttctttggaatgtttgttatttggtgaaaacatggccattggttattacgggttttaaaagtattcttcattgcatcagtatttcctttgctttactgttcctactgtctatctcctgtatgtaaacatgacctaattacctattacacagtggctgccttagttttgtgtatttttatataaatagtctattaacacatgtgtttcaaatctggttcttattcttaaaactggtcttagtctttctttcaaaaaaaaacctgctggaaatactaacacttcaaacttatttcttggaggtggtagattttgatcgcatgctaaaatggctgcccagattaacagtataggagttcaataaagctttctggtctttggtctgttttggttgttattgaatagaaccgggaacattcactttctcttgcctgtctaaaatctaccctctgtggcctaagtcactccaagagatcagtgctctgactttttagttgaagtggactggacagccttctagccaagcatgctcaccattgactaaaagcttacaggaatacctggtgaactcttagccaccaacttcagatggggtgagtatattttaaaaagaaaggcatgggggaaatttctgtagaaagaattaatattgacagaaatcactaactcacctctgatgttgagagttaaccttactgaaactaaaaaaggtatttgttaccaccctttgatttattccataccctttttgccctgaaagacatcactttcttgtatatcaaccagagattaaattgttaataaggtacttgaaaagagaatcccacgttgtttaatatccttgattgtgattctgttgatatgctactttttagattaatgggctagtgagatccagtcagtcacctttagccatagtttgtgatggggagggaccacaatagtggatgttgtctttgattttaaatatctttaagagctactacccctttgtcttgatggccagttgtttaaaataagataaagcatccatttatccagttcatgccttaagtaaagactgactttcaaaacctaatgctactttggtagaatgggttcacgcttggaatttgttccaacaagttgacaatcttgaggtccttaactgggtgtaagaaaggcctagttcagatctaggaattccaatctgagagtgtttatacagactcaaggaagtaaacccacagtgactgaaagcattgaggctgaaaatgcacatactatactgactctagaacatcaaatccagaagtgcaccacagagaagttactgcttttcctcatgatggtaaggctgactgggagctgcagcttgccactgcccatcatctcaaaagagtaccagaccaaagattattagcctgaaaaaggatcaaaattccaagtacagtttctacttgatgtatgtcactttctcactgtggtaaaagctagaccattttaaagttggagaccctttgaagattggcgagaggtagaatacatgctaagtgcacacatacctcccaatgagcagtagaaacaaaaccatcctaggcctttagtctgaagcctaaagggattgggatctgcactttactgagccagctattatggatctccaacatacagagatggatcaagatttatttcaaaagggggaaaaaggaaagctgctgagttgttaaggttgtaggatttttcttttgaacagaaccatcacccatgaataccaagaaacacatcatcagtattcctggtagaacagttatattctctcagtatgcagaaaggcacagtgtacacagttcagacagcaggtttgtgattacatcagagttttggcaaagcttacatgacatttggtaaaaaaaaaaaaaaaaaaagtttagctattccataagtttataagacctggtcatatgcattaagatacacacatgcactatctagagctcagatatcatctgtctcagctttggcttcaccaccaaattatggcaaaattaaattagatattgggataatattaatttggcttagaaagttgacatgaatagaactattcttttaaagaaatctttggctgggggtgtagttcagttggcagaatgcttgcctagcatgcacaaagcccagggttccatcccaagtaccacataaactgactgtagtggaacatgcatcccaacactaacctgtaaatatcagtgtcaaaatcatacaatttgagacctcttaatgccaggaataactagcaacagggttcgaactctcctgttttaaatagttgtatatatgaagacaagagaatcagaagtttaagatcatcctcagctgcatgctatgtttgagaacagcaataatggagaccctgtctcagaaaagaaaaaaaaatcttagctgagcatggtagcatacacagcaattccaacaaacacttgggaagttcaggcaggaggatcaaggccatcctcagttacgtagcaaatgtagattggcagctagtctcagctacttcaggtcctgtctttaaaattaaagaattaaaacaaccaaagatggttggggagggggggcatagaaagaagtctttggttgtttgatagaatgttagatgagggaaagagatgttagcaatgtctttaagtttttctttttctttaaatcaagcctattaagatgttttagtcacccaaattaatcctagacatctgaaggcatgatgtgtaaattgacaaggcccctccattatgtggcaggggatcacagtggccttttaaaattcagtaaaataccaaactcaaaaattatacctagtcttgcagccaaaaggtaagaaaagacaatcaagaattaaagacacttaagaggattggtaaagcaagtaactttgaagttacactacccatgtctgttcttgtggtctacataatgtccttggatcctggcccaaatggtcagaagcacttgtaggataggcaggaagagctcagatcaccctctgggaggagtggactaagcatttacaccaagttgaattcccgtaggtttagctgtagaattgtgtctttgacagcagcaaacacaaagcgaatattctcagtgtcagtagcacaggtgaagtgagaatagatgactttctctttgtcagggttctggtcttgatacagcttcaagataaagtccttggcagctttcacatcttgctttggccctggtcatgaggggataaagaaaggtacaaactcaccaccgtgtctttccacaatccatttttaatgtattttcgttcttatttggaatcctttgatcaatcttacttatatctaagtaaagtttacctggagtagttattacaaatcatatgaacctatgcaatacttttaagtatttttccattttatgcagtgtgtgtgcatgtgtgcatgcttgtgaccagaggacaatttcatgttatcctcaggaatgccatgtacctcctttgactaaatctttcattggcctacagctcacttgctggctggccagcaagtcccagtgatctgcctgtctcccctgccctgactttgtgattacaagttcttactatcatgcctggcttttttaggtgagttttggggattgtttgcaaggcaaatgtttttaccaactgagctattctctagcccaatggtctttttaaagtgtctactggtatctaaaaattgtactgtaaagcactttgtctaaaaatagtggcctagtttttgttttctaaccactgacttgtacagacaggcagctgtggactgggggagggaggtgtggtagagaaactagtgttactaggttggttttaaagcctgacagttctaaaccatactgccagtatgtttaatcaaagcaaggggtggggggagtatgttgtaacactaacatgtaaatatcaatgtcaagagcatactgtttgagacctcttgtgccaggagtgattagtgagcatgagaactgccctgccttgagcaggttgcatacatggaatacttcaacaccagccctgtgactgagaagcagataatctgtaacctcacaaagcaacaggtgttagaagctgtgagctagctttgtcaaggaaagctgagtgaatgcatatgcagcagagtgaccaggctgccagggcaacagaaaggagaggtggcacactagtgcacgctgtagacaggtacaggagggtaagaagggtttcctaggtgaggtgcctgagctgagtcctcaccagccaagtggagaaagccaaataacttggcaaatgcattcaggccttgtagtggaggtgtctaggtgtaaacatcagggacaatgagaagtataatttgaagtgaaaacgtgaaagcctatgagggcttccccagaaaaccatactggacactggagactgctgcaggtgaagaagaggctaacaaggttggtgtgagagcactgttcccccagatacttacctgtgtattctgggaaatagctaattagatgagagtacatgattttctcttccaaaagatctttcttgtttaagaacaaaatcacagatgagttcagaaaccaggggtaggtgatgatggttttaaacaaggctttactctcttccatacggttctagtgagaaacaaagttaggataagtcagaaagaaaagcaagacttcgcaaacacatgggcccaccggacctgcttccatttgccccaccccacccacacacacatacccctgattagttgactttctcaatatcatttttggagcacttaacagttctcttgccctaaacaaggcttctgtgtaacttggagtaaaaagtttatttcgttagacaaggtgtgttctgtaactgtttgattaacaggtcaggtgagacactagctgcaagtgggtgtgtgcttctgagcagtgcctcaggggtattgaacacaggatgaaggaaagcactccagggaggaccacaaccctgagccttcaggcatgctagactggtcagaacagaactaacactgcagagcaccaaagacatgctttacaagtgggatgttgtcccaatttgctggatgagcagagcatcctaaagatttaactttcccaaacccataaatacatgagccctgtgacaattgtactcacgaactgttattttaaacaacacatttcaaaataataataaaagctctcaaatttgagtgggcagatagctgagaaacatattgtatctcatgacaactactgttcttcacagtattttctcttaagtatttctaagggaaaaggcaagaactttcctttaaaggaggaagcagccataaaaacatccaggcttcacacatgctccgaagggatgcaccatgaatctactactctacaagtccacacctgggcattctcccgctctgcaggctggagtccagaatgtattatcagaaaagtaactcagctacttttagagattctctaaagacgagaattatcttaatctccaaaggggcaaaaatttaaaaaaaaaaaaaatctgtatggcagagtaagtggacccaatgcatatctacaactggaaggaatgtgtgggaatagcaaccatttatgtgctctccaaacctgtggttcctgtgattttttttcttttttaggaaagatgaatatatttattttctaagaatattggattgggctcctggtcccttgagcacccaatcctttgactcttctcctaagaattcctgttttgttttgttttcttatgttgagaactgtatctcttgaaattccttttgggagagctagacagcagccactgttactctgatggcagaagtaaatgagttcaccctccaccaattagctaatatattggcactcctcaaagagaagctttcactcaagaggtacaagatatggtttgttcttgggcagtgcactgatgattgataatatgtcattgaaacaagagccaagaaatcttgcatatatattcagagaaaagggccattaggaagatactggtattcctctaaaaaataacctcacaagtggctgacagtcctggtactttctatcagagcatctaatggaactagacccagccagcatcttgcagctttgcacaaggcacagtacctgactgggctgcatctgcccaaacaccctgaatgagacccttgcaggggagtcaggacagatgcaatctcaggtagctcctgagttgctccacatgctgggcacctctgccctaacaactcagctaggaaccttgtttgggagtgtcattctctggaggctgaggagtcggttcagatagcatctgttacaaactgtcacatgggctgtggatgcctagtatgatgaagctgtgggttcaatccatgcagtgccacacaggcataatctcaacacatatgaggtagtgtgaggctgggggatcagaagttgaaggttacccttggcttcatagccagtttgaggccagcttcggctacacaagacccagtcttgaaaggggtgggattgggggagaattgctagacaatattgtatgcattagggtctctgaagggacttggaaatgaaactatccccattggaacccagtaaatataactgtagttcgtggcagtattttttttttccaacatgccacagcagtgagaatctctgctttgtgtgtgtacaggttgaattttacatggtttctaagttaactgagctcccagacccagtcccaggactatctgctttttcctgttttccaccattcatgacccattacattacctggaagagttctcaggccatggccaccatggatcaactaggtgaaagtctctggtatttgacctgggcactcaacgtttttcctacggctccttaggaaattctactgggcaactaactacattaattaattagatccggggttctgtttcaactcttggtatgcagtaaactgcgccatcaaagtcatacaaagatgaagtctcttctgtttcattggtttgtcttgggttttgttgtttcttgtcttgttttgtttgggtctaagactgtagccttaggtagcctggaactctcggagatctgcctgtctttgccttctgcgtgctgtgattaaaggcatgtgccatcaaacctggctctgaaatctaatgatgtctatctcaaagtgcattttgttgttaagtaacatgtgacagtatttaagctacaggggactttgtaaatgggcctgcagtgtgccagtaggttgcattagtaacaaacgcctgaatgttagctggagagtctaatttcctcacctagctagtgaaaattgaagaaataagaatgtcttctacagttaccacactgactcccaccccagcagcatacctccaagttccaaaccctcagcatacctcattgtcacactcagccagaacctggtcatattcactcagagcaaccaagaaaatgatggaggtgacgctctcaaagcagtgaatccatttccgtcgttcagatcgctggccaccaacatctaccatcctactcaaaagaggtagatgatcagagccattgctccctggaattagtagcctttggggtcctcaacttttagagggaaggtgctcttaaggttagtgtgttagaatatgctgctgtgggcagtggagaactattggtggtttccaagcctaggactcagatggagcctgcctggagctattgggtaagaacctgctgtagaagtcctttactccagccacccacatggagtcctacgacacaaatggacaacagcaagccgtcatcctggtatctcatttgttctctctctctctctctctctctctctctctctctctctctctctctctctctctctctctctctctctctgtgtgtgtgtgtgtatgtggtggggggtcatagacacgagtgcaggtgccccaagaccagaagaggtagtggatccctggagttagagttacaagtagctatgagacactcaatataggtgagctctcttagccactgagccacccctcttccatgtcactgatgccactgctactaggcagaatgcaggctcattatttccaggtctgtggatattttagggaaattgaatagattttaaataaaaagtgttgttgtaaatatttttcctaacactatgacagactatatgggtcagacagagcacataacctgccaggtcacacctaccacccctacacccttaccccatccacacaccaatttctgaagaccccaaaccagtgtgtctagatggtccacaggctcactggctaccatctagaaaggtgctttggagccaggttctaggggtacagacatgcctgcaatgctgtatgcatgctgcttgcctcatattgcagagggaaacagagctaggatagaaagcacaaatattaagggacttgatgtgaagacatgctacaaagacctcaacttcaagcatcagaattcttcatccagaaagactgcacaggggagatgccacgggctgtaaggtatcatcctcaggctatattaaacccagtcctaaggctctggaaaggtaaaacctccttatcaaagctctggcaaactcatttctgagatgtttgggaggttgcaagcagccttcaaagttgaaaacatttaaatccacaggtcagctcaggaaagagtgaccattaaattagacatatgtaacaaaactgcagagtactttcataccactccatgtaacagcaatgaaggagtgctaaaacagaattgtaatattgtatttgttgttaaagggcaagaaatgtataaaatgatcatcattagaaagaataaggggaataatattcaagtgctttgaggggttggagaggtggctcagtgattaagagctcttactgcttatgcaaagggcttgagttcagtcctagcactcacatagtggtttactactacctgtaactccagtccctggggattcaattctctcatcatctccaagagctcctgcatacacctggtacacatacatacacacacacaatttttaaaggtgccttgaaatcttcagtgttttgtaaatgacctatatttatttttccaatacaaagttcagtaaagagctgttcatccttagagtgttgttacataaattggcatgtatacattttgcgcgcgcgcacacacacacacacatttttttcatggtttttctctaagggtatatcccagacaaggtaataagggaaagagaaatcttactcaacattagggaaaagacatcagtagactatgttatcacagagtgcacatctgtgtgactatacataagaagcccttttcctggtagaaagagcccagaagtccctctgttgaggagcgtgagaccccaggttatattgacttaagagctgcttaggagcagcatgtaatactccacatcaggatgtgccccctgaacagactgatcttaaaggcctccatctgggagacactcaccggaagatgatgttttccaagtcaaatggatactctatgatgccagtggtgggcactcgaacacgaagcacatcctgttgtgttggcacgaaagagggcatggcgattcggtcaatgtcagtcaggtaactgtaacattaaagagttgagaagctgaggctccactgtgagaaagggaaatagccttccttgctcaagggaagtcctgaccacaggccccaacaagacttggaagccagaagtaacattcagagatgaccaggcctctatcctcccaagaccatcctgaatggatcaggactcataagcacatttggaagccttctgagaatgtaggtcacttggtccggtacccagctgcatatcactgtggccataaggaaagcagcagcctagcggcagaggaggtaggtaatgacactggcccattatccaacagacctgcccacttgccttcatccaagaacattacataaagtagacactgttctctgaaggatctgatcagtgaattaagagccatttctataaaaatacacggctgtatgagacatctaaaataatccaaaatttgttatttggggctgtgtcctgactttgaaagaatgcctttaaaaaacacttcaccaggcgatgtagctcagttcttcaaagtgcttgcctagcatgcacttagcactgggtttaaaccccagcaccatctacaacaaacatggtgacatgtgcctgcaatctcaacactcaggaggtaaaagtcagaggctcagaagttcagggtgctgctgaaacacatggagagttcaaggccagcctgggctagacactgtatcttcaaaacttgcttgattaagtccttacaaaagaccctagctagcaatggagttgatggctttgctactttctgtagcacaacctaaatatccagggctgagcaggtcagcctagagatggacctcactgacttcaaactgctgggcccactcccatgtattcctttttcctttatagccatcttctccctttatccagtgttctactccagggtttcaaatacctatggtcatttatggtccaaaaataagaaatgggaaaataataccagaaataagtaattcattttctctttgtattgctttggcaaagctacagacaattcctaagttttcaattcagtaccattctgagaagctggataaaatctgtctctggtcctagatgtgtaacatacttcctagtgtcccctccccacctgctagtcacccggtagctgtcccagttaccacacaaactgtcatggcattctccatgtgctccaggtaatcaccttattttcggtttctataaagctgttactatcactaatgtttaagttcatcttatcatgcttaatgttcatatagaaaaaaacagaatacaatgccatctgtagtttggagtatctactggggactcgggaaagtggcccaaaagttataaatgggagataaggtgataggttgattgattgaatgattgattggaaccagcagaccatgcagtttctgagattagagggcattggttggttgccacatagcccttagcatgctatctggtatactcatttaggtagtataaatgcatatctaaaaatgcagacattactagcagacgactgaaaaccgaaagctgaaccaagaaaatacacaagtaatatatgttttgtcttttaagacagggtctagcccagtttgggttgagatcctcctgctcttgccttcccagtgctagtatcccaggaatgtgccaccacatccacctactctcaagactggcagctatggggctttattaaatactaccatcttctgtgtaactgtttacctctgcagtcacccctggcatgcctctcagtgaacttgcttcagttttcaagatttatactgaattaacccctacagcagttctaatgagctttctccaaatggatgtaaacccacagcactgtcacagagccaataaaagtgggctgcttctgggagggaatgtgtgggggggggggggaatggacactagcagccctggactccctagactttcttcctcccctgtccattgccaatgtaacatcttactggtttcttttcttctcctaacatcatgcttttctgctgatatagttggatcagttgtgccaacctacaacaaattgaacactgtgcctgggacaaatgtctagggaaagtaaaggctacatgaaataacaatgcctttcctgacagttgctttgacctgttggaactagctcagaagaaggccaacacttaagcagaatcggatggtttgggtgtgagggtgtcatggtcctgggaggagggacagtgatatgggggaagcagaaaagacttagctgtagaagcacaaacaagcaacaacccaagaagaaataatccagcctagtcacctggatggcacacacagtcctttggggactcttaggaaagggaaatgttgcaatctctccaaggtggtgtgcaatataaatttggtcggttgatggataaagctttatggatacaaaatatgtaggaggtagactttctgagagggtcaaataagccatggcaaataagcccgctgagctccctgtgtgctgctcttgcagatacctatgtccatcactagagggtagcataagaccagtggctgatttaagcaaggcctacacctgcctgtggtttgcaaagaatatggtgagaagacagtgaaccgccataggcttatatgtattctttgcttaatataattaagcttaatttaatttaaaaatttgcttaataaaattaagcaaatatatattaattatagataattaatataattccagcaccaaagcttaggtaattctgctaagggactttcaaatttaattaggtgggagctgactccaaggcctatctgggaacccacagaaaattaggagagaagatgctaagagtcagagccagaggtctggaaagaccacctcctctcctccaagcagggagtgaagtcttgcagagtcagcctaagcagtgtggcagcagctgcagtgagcaggcaggcagagtactcactacttagcagagtccgacagctggtactccctcctcctgtcataacactcctggatgcctggatccagccacagctgcttgatggctgccacctggtccctggagagtgaagagactttatctacttccacttccctgatgatctgggcattttcctagtcaaaggaaagaaaacattgcattaagtgaaggaaaggctagcaaatatggggataatcttgtcgtagatcctgggttgggggctctgataggtacagggctatgcacagccaagtcctcagaaactggaagagtgagtaggacaacttgattgctcagtctgaggaagtgagctccagatgacaccagacctgtacctccagtccagcaataacagaggctataataatttatgtttcccataactcccttctacgtgtttctggattagaggtaagaatgaaaatcattaaaaagtttgagacacagaaggaaaacagcagccactgggcttgaaaggccagctatctgttccagcttgcacatactatggctggctttctagtcaaccttacaggtacgaggtgacattcccaagctcctgcttaaatcatgccccatttctccaaaccctggttcagaagtgagcaggtctgtgggagagtgtctgctctaacaagtcacctgtgctgtcaaggcgagggacagggcaggtgtgggtctaggctctcctcatggaattgggttcacctgtttccactgcctctgttagctctgcagctccctagcttcacatccagcttttctccccaactaccagccttgctgacccatagaaacttcacacccaccaccagatacacagaagcagcagcttcccagggccttcctctccatttcacagtgacagcctgtccctgtaattaatttaccattctacagtactctcagaaactggttcctcagtcaaacccaaactgatataccagtgcctccattaaagttctcccggttctaatcaggttaaaatctcctatagtcatgggtccaggtgaaactaacaccttagacatcagccaggatggcctaaatgtctcaaattcgtctgcacaacgacagccaatctcactgccccttctgtgactggtcctccatgctgaatggatgaccaagaccttctctaagatgtcacagcatctatgtaggacctattcacaccctctaaaccatcagtaaatgctttgtaaatttgttatacagtctttcttagacacttgtccaaactgaggcctgaagcccacatgcaacccagaacagctatgattccagcctgacataaaaatcccaaacccgatggcataactcatgagcatggtctttgtagaggatgtcatgtcacaatgtcaaaaagttgggcactcctggtagacaatgactataagaaaaaagtcattccgtggcacacaactttaatccatggctcggtaggcagaggcaggcctatctctgagttcaaggttagcctgatctgaagagtgggttccaggacagccagggctatacagagaaattgaatctcaagaaactgagacagacagacagacatacacaaacacagagggagaaagagagagagatttgatttttcaagtattttaaacataaggctattagaatcataacagtggaacccaccaagagggaggactcactatgtggtggtgtgtgatattttgatctaattctgacaataaaatttgctttgaattggagggcaaagctaactactagccaaccaaaataaaccatagtggttttagaggactgaggacagatagagagacgggaaatagtacagcgaggcttagagaggatcccagcccttttggatggaggaatgagataggtcactggtgacttctccaatgcttctctgatcattcaggttcttatcccaatatctagctcccaagtttttattgataaagaataattgagtaaacacttcgatgtagcctgtaaaagctgccccttgggtgttggttgagtcacatgtgtccagagaccttgtggtgtaaactgcaaatggggtttcctgccactcacttgctcctcctcgatgttttcttaacttcagctttgttttacatgagacagttcagcccaacaaacataagatctgcccttactctttcttctctttcagtgtctgttctttacccagatttgtacccatggccttagaaacacagacttctttttttcacaccccttctagggccagaagggcagctttgtagttcttgacatttgctcttgttgcttcactgccaataggtcttaagggtgtatgttcttacttttccttctcctagtgcatacttgatatttgctatctttatatatagttttatatcaaatataaacctttttctttagactaaagggggaattgtagtgagagatccaaccagcctcacctgtggcccatttgggtgtagtcacaggtgtgtacgtgagcgtgtggtgtttggtctggggtccgagataggcttgctctcttggttctggtagggtcacagagagcagctgggtgtggatccttggagctggaacttgcaggtcattggtttcttatgtaagtgacttctcccggaataaaattaacctatatttaacctagtcctgtgtatcttaatctgtacatctacacagcttcactgtgcactgttattcatggatcataccagctcaaaccagtatgtggctttacaaatgtctggggccctggagccctccacacctgcagaagagggagaagagcatggaacaatgggcattgttctatgagcatgtctgggtggagaagacatcactttagtcacagttcattgatcaggatcagtcagtgtccactgagtgtagaggaggcagggaaacctggcttcctgcactcagatggaaaaggaaatggaactgtatgaaaactgagcaatggctgtgccacttacagactcacaaaacttctttgctaaggtgacttcctgtatgattcctatgtagccagtcaaactacaactggtggaccaaatccagccctcgactcagtatgtgaacaacaatcttctggaatttagccatgcctgtcacactgcgtcctttcacactgaacacaacagtgccaagttgctggatcagagcccagatggagtagggctctaaacattcctttagcccctcacaaaatgatgcttgctaaccccagaaacagctggataattacatacatccacatagcacaccactgtccctcccattcctgaatcattcatctggggtctgtttcatgaaggaatcattctgccctgggtgctaacaagtacaagaatgtgactgtaaaaaacatccttagctgctctcatattcaaccttacagtcctgcagagatgatgctaacagacatccacagtgtgggaaaagaaccttagaaaaatgaattcagtgaatatgaggggagagcaagaggaggagggggagggaggaggaagggagaagagaaagggagaggaagagaaggggaggagagggggagggaaaggaagtggagagggaggaggaagagaagggggaggagaggggggagggatattctacctatacaaatgtatccactccaagacttccaaagagcaatggccagccaaggctacgttagactggggccttgccctgagactagaatcctgaagtgaaatgcaacaaaagtaccacccaatgggaaaagctgtgagttttctgattttgattctttttacaaaatgtagagaattttctaattttcccccttaattacttccttaagcaagccatgatggtatgtactagttgcccagaggtttaatatcacattgcttgctttttataaagtctgtatgtttgtcaataagctctgggccaatgactcattgttcccataaaacatgaaatcccagacatcatgccccaattctacctagagcactgtccattcactggaggacttgtatgcaattctaaatccttccaaactccctaaagcaggtttcacacacaaacaaaggcaaacagaggtaaagacttctgttgagcaattacaactagcagaccccccctccccccccccccccccgcccagccagccacattgaagcagtagcattgagaaacacaggtctttgatggcaccagccagagctcctatctgtacttctgtgcttcgagcccaccttagggccacacacagttcctgaattcttgtggctgatttcttagtgcttctgaacatttccctcctggccaagcagcaagaaaatgcaggggcagggctgcaaacagactggaccctggggctgggcaggaaatagtattccagcagtccatggccctttacatctggaagcattgagagaatgtggtaattctggttcccgctggtcccttcccatcttcagttgggttcatctcactgttcctgatttagaaaataggatacactgagaaaagtctgtgggtttccattttcctaggctgtaagctgcaccagtaaatagaacgtgcttagctcaggtatggacacaagaaactttgagcagagaacagaattactcttcataatacattcccttcccacctcctaaacacacatcctcaaaggacccaagaagtctgcaagagcctcctcattcgtggatttcatttttgtgaatttacctccttaccacgatttatatgtagctccacaccaaaatttatgggtcatgtgaatgaagaacaatgaaagacaatgaaaaaaagaaaaataaaaacagaaaacatcatgtgagtgaagaacaaaaagataatgaaaacttacgacatttccatggttatctttgtgcaagtacagagtcgggttagtgagagcaagcaggcagggggcagggaggaaggggggggggagagcgagcttctgagcttcttcgacttccctgtcctttatacaggctgccagcagaaggtgtggccctgattaaaggcagatcttccctcctcaaagatccagattagtgggtcttccaactacaaatgattcaattaagaaaaaaattcctcacaggtgtgccaagtcacttgggttttagttcattctagatatagtcaagttgacaaacaagaatagccatcatagttactttttagagtggatggggaagtaatggtcaggatttcaaggaggatgagggagctgcatttagttagagatcaaagcattggcaccattgaagatgaagatgaacagagccatggaggatagggttatatctgcttctgggaccaggctcaaagctagctctaaaaaccatcaagaaatctaggatgttgtccttcctcccctatgtcttacagaccttcacaatagccaggaagatagccacaggtacctgcagaagaccatagcaccccaaactgtctgccatatgcaggtttccatgcctacctgccacaaagttgccgggacactcttctatgctgggaaatcatattctcactggctcttgttattggactcccaggattttattccataggcatacaggttgtgggtaggattcagttctttacaagggaggacactactgttttctccttggctatcaccaaagttttctctcaggttttggcagcttccctctcccattatggtcacttttcaaacccagcaagacattactcctgaactctagatcttttttcaagggggtggggagaggatagcattatctctaacttaaactggtgactacctggggccataaacacccccaacagacaggagtcatattcctttggtgggttcttggaggtcttcctcataaaaacaagtgatccctgcaattcctacagagcccttcttttatctctgaattctccttccttacttttgagaggggaccccccccccatctgctcacacaatccagtcctgggagagatagccaccatggtcctcacgccctaaagaggaacgatcctgcccagtgcatgattttgtcacagttatgaggagctttgcttcacattccttactgctcagcttgtattagacaggaaccacaacacctcatacaggacagaggtcagtcacatttgctgtgtgatggccccaatattaaaaagatacacttttaggattaaaacctagagcaattaggctttatggaaaaagtgataagctttgcctgtgacctataggaattatctaaaggaactggattctcttttcagtttagctagtgtggagcatgagaataaagatgttttagcaagtcattagacgttcaggaggactcacatctcacaaggcctctgtgtgttctgttcagctaagtttcattcttttgtattagggtcactatttctgtattggctgcctttgaaaagcagacatttttatggttccagtgtattgtgtaggaaaataaactaaaaagaaaaccatagctagcacaaacagaataattattgtgtgacactctagagtctatcatgagcagtgtcccatttgatcattacaaccctagggaagttaataacttaatatctatataagtgaagcctaacaaaggcaagagatagtactgtgtctgaccacagggcccaggccattattagccataccatgcttatttaaataattaatattttaaagggaggaagttgtatggaggtggttgcctattaaactctccaagctggaaagaggtagtcatgtttgacaggactatgaatgtgtggaccagagagtcgtttttctacacgacgtgtctgttgactactgcattctagttctctgaggacaaagctcaatttccctctcaaaaggagggagggggtccagagaggtggctcggcactttagagcaatactgctcttacagaggatccaatttcggttcccagcacccccatcaggctactcacagtggcctgtgactccggctccaagggatccagttccctctgctggcctctttggaacctgtactcacatgcacatacagatatacacaaacaaagaatctttcctcctcctcctcctcctcctcctcctcctcctcctccgattcctcctcttcctcttcctcttcctactccttttaagaaaggaagggacattcagagataaaagagggtctctacaggagtgggaaaaaaaaacagtaagggatcatttgatacctgctgtttttatacagaagactttcaaatatctacaggagagaaatactttctttaaaagagggtgaacagcaagattagcttgatgccagcccacacaagtctttaactcttactctaaagagtatgaacatgtggttttcttgttgtgtttgtttcagtcttactgtgtagcccatgctgtcctcaaatgtgttcttattgcctctgcctcccgagctctgagcagaaggcatgctatgctaacacacctggctcaagaaacagcccttcatatcagtcactaatgttaattactagttaatataaacaccagtatcagtatgtttgcagaacaataagcctcagtgactacctgtgaccgtaaatagtgctgacaggcaagagcactgggctccagatcatggtctatgactcatttctccatctagtggcctcttctgtaactgcaagtctgctgacagaaacagtactccacggtgacagctttgtggctgcctataaagaaagtctcagccagaactgcatggctgggttctacattacagtctctcccagaggcaatattagccagatgacccagacagtcccatcctttaaggaaagaatgagctagattttagtggaacatatttcacttgggccaattttgaagctaacaaaacaatcccccagatttgagagtcccttggagaaccagctcaaacacctctgaggtatttgaaagtgatgagaaggtctgctagttgtgaaacactgaggtacaggacaagaaaagctgtccctggaactaaggcttcagggcaatacaggtagctttttgctgctctatgtaaagccgtcttttcacagtatttagcattgtgttccaaacaattgtctttcctattgcatgtcttccattgtgaaaacacactcacatctaggcagtagacacggcaccaccctccatccttcactcccatccctgcccagtgacggcttcagctgggtgggttcatcctccacagcaaagcttgccttcttgaaaagaagatgttgcaacacatctccagtgaagcatccactgacaactccaccctcaaccccccttattttctggtgtttcactttttccagtcttttcaataggttgaaaaccacttaagcagacaacaaatatgtgggtcacagcttgctttaataatgtgctttggaaacggtttcaatcctggatgcatgtttggtgcttgttttccttttgcactgaaaacccacaggcatttcggcctaggagcagaatggaggagtggggggtgggacttgtttcccaaggacccctagtcctctgctccacgggaagccactatagctccacagccctgcagacctcagagcccaagccttgccctcggtctagatagatcttaaaaagagctgacctcgaggagcagccagcttttcctctgccaaccactgcctgctgtcccgtaatgtcaaaccagctcaaagggcacagcactgaaagggtgaagaagcttccaggaactccagatgctctgaagcaaatgagggcagtggctgtcttggtcaagtgctggctgtgattagacagagggtcaagggctgggccaactaatgcccatgaggctgtggtgtctccaatgcctatggaaagagaccccatggtcgctcaacaaggttagatcagggtctggatttaattaaccaagcaatcaaaggctggtcgggacacagaacatgagtctgaacttgagatacatagtgaatactttttaaatacaagtatgtcacctgtattaataaaaatcccataatctagaatgagttcaagtcactgcagtgtcttactgcagtggagacactgaagagtcccttactctgaattgggggttgtttatcaactacagcatttttttgtttgtttgttttcaaggcagaatgacatgggtgaggacatatcgtgctcacttgtccaggaaacagcttcacacacttgtagtgctccaggaagtccactaagcacctttttttccacgtttcctctctccctttcccccatccagcctacctcccctctttgggactctgtcaccaccaacaagtgcagaagttcctcccagtcaacagactgggaactgaaaatattggaaaataaaatccctacacctgtactgaacatataccatggcaactttctgtgtcgctgaagttaccaccattgtgttctgtgtgcatggctcgacaggaaggacatcagggctgctggttccttgaagggggattaacagtggctcatctggctctcagggaaaaacttcaacattccatacaaacagccttcaaggctcaagggacacaggtccattaactgtgataagtggcaaacctccagcctatagcattcaccaagccatggtccttcctgggtcctgaggcacaccctaaactgtcctcactgtgtgctgggtgtggggctgttcaaagagagatccttggagcagcaggaggaagactgctcagaaacacagaacatggccagcatctttctatgggcttggttcttggactgaaataaaaagagctaacatttctctctcctctctcctctctctctctctctctctctctctctctctctctctctctctctctctctccttcctgaatgtgggtgtcatgtgagcagatgcctcacagttctgttgtcccaccactatggcccatacctcaaaccatgagggaaaaaagaaaaaaccttccttcattaattagcatttggcaggtattgtcacggcaatgtgaaagtaatacagaagtttggtaccaggagtgggaacactaccatgataaacctgaccgggaggttcttagacctttgggactgctttggggtgggggcaaggggctgtgggaaaatttagaacctagttgtgatgagggatgtccttctgtatatgtttctcttattggttgatgaataaaacattgtttggccagtatccaggcagaaaggataggtggggctacaagaggaaggagtgaggagacagagagaggccacagagagaggccatgctgcccaaggagtaacatgcaggattacaggtaagccacagccttgtgacaatacatagattaatagaaatgggttagtaattaagacagagctagccaataagaagcctaagtcattagccaacagttttataattaatatagcatctgtgtgtttatttggggctgaaatggctgtggggccaggcaggaaagaaactccagctacaaccatgactgcagcctgagaccaatcccctccagacactacctcctgagttgagccaacctgtttcctcattcagccatgtaattcctgccatggtgtactgtattctcaagctatgaacctactaaaaccttccttaagttgcttttgacctcaatgactttatatccatctatagctatagctatagctatatctgtatccctcaggtgacaactcaagggtcttaagacactggggttgaagcccacagtgagagatgagttttcagtcatgattttttttttttttggtggctatcataaatccactgcctcaaagtccacacttgtgttggtcaccaggtcaccagagtccacagggaactgacaacagaaggggactctaatacagtcttaataagcagtctttacttgtggtgtggatgaagaaagcatctgtgagttctctttgcaaccagcacatcaacagtgtacccccaaacagctggcatgccgacacccaaagccctgagactgttaatgaaaacaagctggtgttgctcgatgccttttttattcacttcacataccaaccacagttccccaccccttcctcccgctacccccctcctagatgtccttttaaaatcctgtctcacacatgaactggtcagttctgtgtagatgctgacctttgcttttaaaccccctaccccctgtagctccaacagaaccaaggccaagaaattacatgtaaaataaaatgaacctttatccttaacctttagttgttaactccagccaaacatttctgtcatttagaaagtgagatttgctcttagataaagttttttttttttttttcttccacaaagaacacttccacaatgaagcttctctggtgacatcaaaagcaatcagaaatgcttcaaaatgatcatttggtttctatttcagtggtgagtggtggcagaatgatgccaacttcaaaagcaaagagcccacaggaccaccaaggccaggaaaatctaggatcaggagcagctggccagcctgacaaccccagccagcatgcgaaccctcaagagggagctgggctgccagcatcgctggggaaagcgcgtgtgcagattctcacatctccaaagggaaaaaggaaaagaacccacaccagtgtcctccacatcacattccccagactcctcctttgcacgagcttaaattactgttcgctgccactatgcatgtccaaatgtgtgtgattacatatatgtggtcatgtatgtaggtaaggatttagtgctgggatcaaactcaggcacacagtatactaggcaagtgttctaccaagtccataatctttctcttaattaagggtttctgactacagggtctttgtttcatctttttaaaattgtgtaacattctcatttcccttttaaaaaccttactgatatatgctttacatacaatttactcatctgaaatgtgtaatcaatatttagagttatacaactatcacatctacctttagagcgtttctgctaccccctagaaaaccaacagtaaactccaggttgaacggtgtcctctacaaggatgcactgaagttcaaatcccttgcatcttagatgtgaccctgtttggaaatagtaaccggataacatgaggtcattgcagtaggtccaaatctagtctgacaggtccttacatatgtccccattttcagctctgaaaaccacttataatcacaaataagtggctaatatggttctcttttctacctcaagagtgcatcttccaacacctcatgtggctctgctgcctacacacaaggctttctgtgcagggtgactatttctagtatttaccaatattccagggcttctttccctgggaacacagaaagaccatctttcattggggatgtgagtagtttacaaggccagcagaggcccttacttcctttctgtttctctactttctcatctgttgccatgagtcacagtgtgatgatcataaaatgggcaagtgcctgttagcctggaagccaactgataactgtgggaagcagagccctcgtccctctgggtagtcatgagttagtatgagcaaagcttttgtgtcctaagccaccagagctgggaactctgtttttacctactgctcatcttgactgatcataaatcatgagaattctatgcttttttttaaaaaaactttgacttcatacagcatgtgtgcatgctcatgcgcgcgcgcgcacgcacgcacacacacacacacacacacacacacacacgtgcacacacactcacacgcatgcacgcacatgcctgattcaggcaatttcatctctcagtagccacataaaatccacactccacagcaagtccacatggtatcatgtgacctatacacaccctgccagtctgtgtgtgccccagcttttcaaatgtgtcccctcatctttttctctcttatgataaggaactgaaatgaggctgatacccaatacacgctacctgtttccatcttccctttgcatgagaacttgtgtgcatccttccagactcagtgcatgacatgcttgctgtcggggacatagaaggctgagccaggaggtcggtggacagatagaagtgaaaacttacatgcaagttgtcaggagagaaactcagattgttttaggatggaccgcacttttttttttttgcatttggggagaaaatggaattacagaaaatcatttacaagcatgtgtcagagttctatttcatgtattttttattagttcaaattaggaacaagcttgcttcacatgtcaatcccttctccctctctctcccctcccacccaaccctcccctaaccccccaccccgtcctatttcatgtatttttgaaggcaaaattaacaaccaggaaaagagccagtctggttaacaagtattacattgagtgagcaacaatctctctggaggcatgccttacacagagtatgtttgcattttgcaactgcctggtatggctaaggcacccccccccccacccctaaatgcccaaatttgcagctgatggcatcatgtctcccactgcagcctcacaacctccaggctgcccaagcattcttgtaacctgacggtcaccacaccatggaagagtacaactggggaatttggccccatgaagtattatagactgtgtggctttagtgaggtcttaaatagtaggcctgccatttgtgtagatttagtgaaataccatatccaggtggaccccaaaagtacaaggacatagttcacagattcttgggtaaactcaaggagggtggtgttcctggtttgactaagggcacgactacaattttctctggccactctgtgccagagctctgcagagcaaacataaagccttgtgcagccacatgtttgaggataacacctaaccctggtgagcatggctggttttaactgcttctgtcagggctggatccgttgctgacactgccctggctcctatggaagcagccaattttcagattcaaagccaatcaggatatgctaccactttaagggattcaattcccagaatgcccaagaaataaggtaaaattattctacaggaatgatgcttctctatggatgacacagacatcacactctacaataaagctgacctgctttgaacatacagttaagggttacccaggaggactacacagagagggcagtggaagaaaggagggacgaggagggaagacaaggtagagaatacagggaggggcagctaacattggggaccatttgaggggtcgtacggaaacctaatagttttagaagcttctgaaaatatatacatatatgaaaggaatctaaatggaatcaacaaataacagggagacaaagctccagctagacatcttttgccaccaagtaaaacctccagttccaggaatgggttacatctaattgagttgttggccccatggaaaccctcaaataactcaggctattcccaaggctattggttgcttctcataaactgatgataaggccctattgctgataacaacacatgtatcttattgagcacaaaaagttaagctggtgcctaactagagtcttcactgctactgactagtgtccatggtacatacaaggaggtactcacactactaggggagcaaagtaaatgccaaccctgctataaaccctttgatctataagggttacctgcctgtaagatactctggtgtaatagtggctctgaagttgtgagagtgactaaccactctctggatctaaggccaactctctgaggtggagcccatgactaactatttggatggccatggatctgagattaggtaaactagggacctaggggaaaaccaaatactattgctctgctgaaaaagcatcacaataaaatgattcatctctatgagttcaaggctagcctgttcggcataatgagttaagccatatagaaagaccttgtcttagggaggaagcaaggaaagaaggaaggaaagaaagaagggaggggagaaagaagaaaagaaaggcaggcagacaagcttacaaaagctgctacaaatgtggtccaagaaggctatgttccatcccaaaattgtacacaaacgttatatgaaaagaggcaaacttcctttgtgttaaggcactgaaatttaggagtttattgtaggaactattagttaatatggcttaccctgactgtggaccacatgagaatcaatgatttataagatggagtattgagcaggaaggtattctattctctacagtttgatgtgcatataataaacaagaggctagaaatctccctgaatctaggcatttcagaacccaatgtggggtaaagctgagacaatgtagctaaactcaaaagaaatgcaactgccctgctcagtaagtagaaataatattctttaacagactggctttattcctggataagttgtttcatgaaaggagtagggaagtgtccaatgccagggaagccctgggcttgctctgcaagaaactgtgtcgagacaagagatgtgatgacaggatgggctgctctatactgggatgctgttatggggaaagagcatgtctactctgctcttggaatctgttagtgcgccccctgaagatgagtgcataggaaggaatttccttatttttccattcctttagcaaaaatgacatttcaagctatgatgatggaaaactaccatttttgaaaaacagttgtctgccagggaacttgcctgtgatctgtccatggaaggtgtggccggtgacttcaagactttcactttgactgattcactgggcatcatgggtctcggtgccaggctttcaccaggcatatgaaaatgctatagccctattattgagctacagaaaacctttgagctagaatttcctgctcatttagagccctggcctagagtttttgtttggttttggttttggttaatgatgttgaacttactgagttttactagagatccaagcagcctgtatcatgctcttccaatggaaacccctttgcagaacacaggatttcaaacggaaatttaagggacagaatgtttccactttcataagcagcttgtggcacaagaaactactttcctgctgtcctatagaacactaaaactcattccttaccatgtaactgcaatctagcatccattatctaacctccacctatgttccaacccatgttgcctctaatgactgtggttcctcagtccatctctatgaaagtaacttttcatatagtctttctgtacctagcttatttcatttaatgcaatgcctttatgaactgtcaactttttgaagataaggccatgcacctgttacataataatgtcctaggaatattggaggggtcaaacttgagcataaacagattaatgatatattatactcaggtattttatgacatataaaacccagaggcaagtagtagatgtaacttgatttgccaacacaaatgagaacaaatggtgctggcagccagtgtcaccacagcttagagcaatacttcttccacttttatgcctgtaaatgtgcctctgatagtgacaaagtcactgaaagtcttctggagtcaaagttaagcacctaatttgcttttcactgcaaatcatttctcctatttatttctaggttctcatctgcaaagtaaatttaaacaaactacagctaggcaacaatttattctctattttcacaacatacctttaacaagcctagacccatgacagagacttaaagtataatacagttatttaacagtgaattgatttagaaactaccccctaggtttatggcagagactctgtgacttagccatgcttagcaggatgttgagcacctttaaaacgacaagcttgagagactgtgggacttaacagtgcttagcatgatattgggcaccgttaaaatggcaagcttgattactattttatgactgaagaaaggccaatgtattagtcagtctgtatttggtctcaatatccaggtctcagctgagcgtgccactggaatagactttctcatgctgggatgatcaaccgtggaaccactgatgggttattatggtttaaatgtggaatgtcctctataagcccatcatgtgttaaacatctatcactgatggtgttgtttgggcataggccttggggactgtggagcttagctgggtgaatttctgtgtcctgactcacagccatgctaccagaccctgagttcggcctgacaagcattccctgcagtgctgagccacagatactgaactgggatgcactgggaacccctcttcctgtaagatgctgacaggcttttgtcacaataatgagaaaaggaaacaggctttgcagagaacacgatgaaagacttgggccccagggagtaggtcactgcctctgctccttttctactctaaaaggttccagagcacagccttctacaaatccacaggctgctggagaatgctagcagctgcaggagatcagaagagttcaatttctggcacgacgtgggaggagcaaatggcaagcgtgctgtagatcagggaaaatgatagggaaagggtacctggtgagggatcccaaaaacatactgaaaggcaaggatgtgggacagattaagttagcctttgggtaggatgtctgtaaacagcctatgccaaccatggcttttctaaatagtgtttgccatttccctgatttcaaaacatttcattttttcatgattacaaaggttcatataaaactctggaaaataccagaggaatggtgagatgtaaaaacttcccccctgccagacataagcattcctcacatcttaattctttttcaaggtactttacaatttagaaattactaacagcaacttgtgaccatattacaaacaattgagtattgttatcttcaccgcctataataggtacatcttaacattttaaaaacttatttgaatggaggtacactacattgaggtctaatgctcttctcagaagtcctagattattaaatagaaatctgtaacactcccacacctgctccaacctcttaaaactcagagaacacaatgggagaggtggcaggatgttggcaagagctgcaggttggcaggggttgggggctgctgctattattgtcttatggacttggcagtgctattgactcatgggctcaggacaactgtaggtgcctgtataagctctgcacaagatcaagccagtcaaaattccagcatgtttgggagaggaatacacgaagcccccacaccttgctgaggagctattggcagctgatgggtattgagagagggagaatcattttttcttcaagagtgtggctcctagtaggctgcctatgctccattcagtggccacacatcctgctcttatgagcaccaattggacttgatggatttttttttgggggggggatttttttttaatgacatgaagttgggagggagctgggttggagaaggtccaagaggagttagaaggagatggtagggataatataatcaaaatatattctatacacgtatgacattcatgaaaatgtctttaatgcaagataatttaaagtaagaatgaaaaatgaacacatgacaatgtaatgaataaaaatgcttgttgtaaagactaattttcagtaatgtggacactgggatgttatgctctgcaacaatcttctctggtggattgactttgccctgtatggagagggatacggtgtggagtcaacttgtaaccactagggctccttattcctactcaacttccaagtcactgccatgtccagctgcaaatctagaatacacaaggcattaagaacaccctgtgagttcataaaaatgagttcttggttcctgaggcttcttccaaccttcctatcccttctgcctttcaaaccttttaaactttgtattatgtataatgcctagattttggagttgtacttcactggagaaatggggaaaactgtatacagtccatcgttctggcagtggaagccccatttgctcttcagtgattaaatacagcacagcctattctagaagtcaatcccggttgaacactgtacccattgggttgtgataaacaccagcctcttgggtgatcctcaaggtgatttaggagaaataaggatgtgaacagtaaggaacatagactggagacaacaaaatgcctccatagtgaacaaagcagggagatgaaaatcattacttcaaaaactaatttagcagccaatagaaacagctaattgctaaaaagtgaccttaggaaacacgtgatgtcaatttccttcccacctccccactcctcttcctgtgggctttttgccagcgctgatttttaaaactgctttgtagaaacccaaaaacacctgattggctgagtcagtgcatagggccacacatcccacacaggctacaaggccaggattccaatgagaaaacagcagatgggctatgcatagaaacaagtatgcatgctgacctctgacaaggttctgtcaccgccctacccagtctggcctcaaagtacccactgaacagacttcatcacccactttccttaagtgtactgcagagaactgagaatttaaactatttccatcatagccagcctgtgttatgagtaatggaaacaaatctttttcaccaccttccatgaggaattcttttccccggccctaataaacatcatcattttttaaacccttaaatatttgaccatttactccagactatacaaacgacatttctgttgtgcgggacctgctctcacagggaacctgcttttttgcaaaattccagtctgcttggctacctcacaagaccacacagactgctcttccaaaagacaaatctcctgtagaggcaggagctccacaaagccttttcatcgagttttcagcccgtttctaatcaagacaaagagcaaaatatgcccctccgccactaccatcacaacaacaaacaatatacatcaagctcacacccacttccatgcctctgatggaggagcccattggctctgagctatggagtcctggaacaaaaattcattggattttcaaaagccaaaagcccctgatcatttgtgctcactggtgcctgagaggatgcatcattacagatgtaggctcaaagtagagggtctcagggtaccctgtccctgacgtcagccaagctccaggcacagcatcgatccgtagtgcacacttagttggaaagtctggctaaggatgtagtttagtgaacagactatatgtgaagacattcaggtgagggaagattttttacttataataaagttcttttgatatgggctatttcaatgtttgtattggttatttttaatctctttaagtaaacttggcaaagcctctttgaacaacatcatgaatcatcaattataatgattatgaattttgaggttatgaattacccccaaaccaagccaagtattagtggcctttctcctggcctaattacattttgcacagccctcagactaaggctcatagcagcgtattataaatcactaggtctctgaggccagctctttcttatcgtttatctccacacagactagggattttaaagccaggataaatcataattcttccttacactatgagaacacagaaatatgtatgaattaaaaatgaaatgttgaaatgttaaaatgaataaatgaatgggtgaatggatgaaccaatgaggaatgagtggcaaattttgagtcacatgtcagtaatcagaaatcttccgatctgaaagagagggacataagccactatgtggcttccaacggagaaatgactacagtgggaggaaggggccactatatctgccttatatttttatgtagctttgaaatatgtctttccatatgagcacacactaccatagtaatccccttccttcctggaactaggtgagagatccatagtaacaaacacattttcttttattaatttaaaaatattttattgtatatgtgattgtgtgtgtgtgtgtgtgtgtgtgtgtgtgtgtgtgtgtgtgtgtgtggttatgcttttgagttctgtgcttgctgaagtcagaagagggcatcggagcccttggactgagagttacaggcagttgtacactgcatgtgggtgctgtgatctaaacttctctctggaggagcagcttgtgctcttaaccaatgagctatctcttcagccttatttttcccccttcatgtgaaataggttaggtcaactctaactgataaaaatgtaatgagagccatttgttaagcttaaattttttaagccaggcacttaaagatataaaaagaaataagggaatttatttttaataaaacatttaatttcaatatatctaaaattcccaaagaaaaccaatgtaaaaattattcatgtgtattttttacttttgtttatattgtctttgaaacccagtttatattttatacttacaacaaacccagattaaactaggagcctttctgggactcaatagccgtgtggagctggcagcccctgggctggacagcaaagagcagagacaaagctaggcctcatctgatgcctgtcccttgggtttgggatgtcttccacccattcctaagactcttaatcacttatcctgacatcacagcccttatagaaatattatttttataagtcacccaaaacccgttctgtagcttacacattttaaatgaagcgacaaaaaagtgtgctcattcccacttctcagttgaatggtgtcacgtaactgccaagttttcaggtcataactaccacccctatctttaaggacacctccctgaatcccctgtgaccatggcttccggttcactttcctcttagaaatcacagtctggtgcctcataactggagaaccagttctctgaagtccccaggaggaagcctgctgcttcaactactctgtgtcccaatggctccctggggtgacagagaggttaggtctcaaagggaagctatttccacaacttgaaagagatttctggttctcggccaaaggcaggagaaccttttaaaaataaatcaattcctcatttccaaagaacaaccatgtagagcatgtatgctggatcaaatgccacaactgagaaaatgtcaccatcaaagccaagaacaactgagccccacccccataccccatagaagcttactgagattcataaaaaacagctgtctttcccctggttctcactgactctaatcgcatgcactgtttcttacttcaggaagcatacaaagcattattccaacaattaaaaaattatattctgccttttttgtcttttttaatgttttgtcgcttcctcagcaccctcattattatttagtggatttagtcaaatgaaagtcccaaacgttgggaaaatctcttggatcccgctcatccctcttgttctgctctcattgtgtcctgaccatccagtcattacaactcccttagtctcaccctccatacccactaattagataagggaaatagaaccagaatgtacatatagcattgctgagagtcagaaaatgtgatgttgtttctcttagtttaaaagtagtctgtggtgatgggggtgattaatttgaattgtcttgcttagtgaaggtcttgtgatctaggtttcactataagagcgataaatatggtctgggacaaagctaggtggggaaatagtgatgctgtatttaaataagaagtgtctaagatgtatacatgtatttctttatgtatgaatgtattatgtatgtgtgcttgggtatatgccctcatgtttatatcttatctctgtccatagaaggggaaagagatatgtaatagccatgaagctatgagttcattgagactttgattcttgcatgtcctctgcaggaggaaccaagtctccttagagaaacagctgtgtttaagacagggcaaaggaaaagcaaagcagcctgaaacagcctgtgcccaaaagcatggaagaatttaaaaaatattcagaaacatatgaacagtttgaccaggcttcaactggctaatgcttactaccaaaaggataactaaagaggagagagagagagacagacgagagagagagagagagagagagagagagagagagagagagagagagagagagaccagtcagtaaagtggttgcctttcaagcaacaggagatagtaagaaactgccctacctgttcattctataatcaagctctgttactagcaggcagtaatcccaagggtatgcatagaaatgaaatttggcaaatggatgtgtttcactttccagaatttggaaacttaaaatatgtacaccatactaaccatactatagacacattttcaggatttcaatgaactactgctcttagctctaaaaaggctgattctgttatcacacacctagtagaggtaatggccattatgggtatacctgcacaaataaaaactgacaatgttccagcatatgtctccatgaaattggaagagtttttcaaatattataacataaagcatgtaacaatcccccaggacaagcagtagtagagatctaaccgtactctaaaagaaatgctccaaaaacaagctgggggaatgaaaacccttaaacataggttatgtaatgctttattgacactaaactttcttaatgctaatgagaaaggacaaacagctgcagaaagacactggactatggaaaaaacttctgaactgaatcagctggtgtacttcaaagatggattgacctcattaaggaaaccaggacatgtgttacattggggaaggggtttcgcctttgtttctacaggagaagaaaagctttggataccatcaaagttgatcaagattcagatcgaacaggaaaaaacctctcgatgaggagaaatgacaggtcatccaccaaggtacatttcacgaatagtatagaaacctcacaaaggaaaggggagtgtttggttcttgtcttcacaggaaaacccatttccaaaatgcaagaagacactgaatgtgtaaatacctaaaaaaagagaggatagctacccaaagagaaccatcaaacaaaggagaatctatcatgtggtaaactttaaaactatttctatacaagaatctatttctcattacttcctactactctttagtcccaattcacactgactttagagttggatttggctctcctcctctaaatccaagtatgttgttaaaacaaaattcagagtttctgtattatatcaagaagccaattgatgtaagacagaaaaagaaaaaaatcaagggactgtcatttgtgtattctcggttctttctctgaaagtctaaattccctcataattattatcttccctactgttgccctttctggtatgcatacctctaaaggttgaaactccaatgctgatattaatgtttaggttccctacagcgaacaaagaacttcctaacagcaatctctgaactctcccgaaagaaaatggggccccacctcgtcgattccactggatccaacttgacgcatttgaactgacaatcaccactctcaaacggggctgggactacaccactctagacaactccagaaaatcgagttgagatgctgcatattctaattacactctggccagagcttcagataagaacttctgtcaaaacaaggacttcaatcaagataagaacttctatgaagaacttcaatcaagcatctcctgccaaacagagactgggtacaaatgttgtagctagttcactcaagactttcactattctaacattttcttcctacaggaccccatgaggctatcctcatcccatttcagcaggaagtaactccaccccactcccccactgttgacactaaggataatgtacacctggttagggttagtttttctattatttagagttggttttggaagaaggtgttcaggcctggatgtctccctcagatgactttagagtttagatgggatagatatggttaggatgagatataggtagattatatcttcttgtgattcaacttagtgattattaactatagacaacttaaactgttatagatccatgtatgatgtaacttaagtataatttgtatatcagaagtcgtcttactgtgtaaagtcttctctctacttacgatgatgtatgctcttacatatatgctaagacattttgtatacaatttagttttgtttcaagtttaaatcttttttttagacaaaaaggggaattgtagggagagaccctggatacctgtaccactgaccacacccatttgggcatggtccacaggtacctgggggtaggataaaaagcggggaggagagttgctcactgtctctcagggttcaggccaggtctcggaggcatcttgggactgggcttctcggagtgccaatctggttatcggctctttgtgtgagtattctttcttaataaatataccatctaataacctatcccatgtttggttctgtttcttttcagtccctcacaagcttgggcagacgtttatctcctaagtgattctagagctggtcaattcaactatcaattttaatcagtcaccacaagaccaccccttttaacttgacactgaaatatgtttaagccaaaagcttctactcattgtcttctaggctcatgaccatctatctattaatgcaaggtgtccttgcagaaagtctaatcctgccacacattgcctggcctcaggtgctctctgaaattatagacatctttcactttcatctttcgtgcttgcaaaatcagcaacacataaatgacattgccaagttctgctgttttggaccacagcagtagcagcctctgaacaccttagtggctcaaagacaaaatcagtttcctgagcattcttttgagagcaggaaactcctgctatggtattatcactttgggctttctccttttacctaaatttgcagttttataagggggagccttatatgggtcttgcctttggaatacctacctttcttactgtcccagtgaaaagtgtgaggtttctctttaaccattgctggtgctttctaatctccatgctccttccataagttttaaatttgcccacacaattttcctcactagaacctcctccaccttcacccctacctccaccacaccgtgtgttgctctctcagtgtagatctgagtaagaatactgggcagtagccatgacagcccgagttgtatcctgttttgaaagttcttttcccaaagaaattattacaccactcttgaattcagcctcacttaagttctccagagttgagcagattaactatagtcagattctttcaccacgatatcagacaaatagccactagcctagtcctcaacagtctttgtttccttctaaaagtccatggattatgtctccatggtctgtgattcttttgacattctgggcttctaaattcccacttgaatggtccattctactcttcttattggaccacagggcatctatagcctgaagttctaagttcttccacatgccccccataaaatagtttcaaaaacaaaggtgtaataatccaggcaggcctggccccacccttaggaacctggcatagtgcctctgtgcatgcaagctctgtacgcaggtgcggggagggggggtctctttaagggagaaattgcccactctctcttctctcttttctctgaggaggccgctgtctttccctgtctctgtccctgttgatctctttctctctttccctttccttattccaagacctcctcccacataagttctgtctatcggtctcttgcctgattctcacccatcatctgtctctcacccacagcaggactcgccatagtcccaccttgcgctgtattataacaaaaggaaacatacagtcgggtccctcataggaccagccccaatcctgtacaaattttctcctagtttagttactcttcttgttactatgacaaaatactttgcaagaatcagcttaatggaagtaggactggttttggcccacagaatggtccattgtggtggtgaagtcaggacatcaggagcctgaggcagctggtcatgtggcatcagcaatcaggaaagttcactttctcctgtttattcatccagcatttaggaaaggtcttcccgcctcacttaaccatctaaatgatgcaacttacagacatgtgcaacttaatcagacactctgtacaggtacaaccagaagcatgtctcctaggtgagtctaggctcaccaaatgatgacccctcccccccagagatgttcaagactccagtgagacacgctattgccatgtacttgtctttattctctagtgaagacaactgtttaaagcggtgatttaccacctttacatatgctccttacaatgtatagcatacaaattattgatttcagaacattcacaaaactgattagccacaatgattttttgttgttttttaaagattattttatttttagagactatagtataattacatgatttcccccttttctttcctttctccaagctcttccactttgtctttttaaaattcatgacctcttttttttagtaattgttcttatattgtcatgtatatacacatacatgtgtacatatgcatacatacataaataaactcaacctgttaagtctgtacagtgttatttgtatgtatgttttcagggctgatcatttggtattggataaccaaatggtgtgctcttccctcgggaagactattgaagaaagagaaaagagtatagagaaagaaacagaagaaatgagagggacaaagacagacagacagacagacaaactgacatgttacaggaattgccttgtgttaggaaaatcaagaaatcctatggtttgggtgtctgcaaactggaatctggaaccgaatcagtggcgtgatttagtctgtcaagccagagggcacaggggctcaatgacttggtttcaatccacaaactgatgtttgagggcaacagatggatgtccagcttgctgtgaattcacctttctgttatcagatggcacctccccatattagtggcagaaatcttagtctagcaaagcaaatgtcagtcacttctgaaaatgtgctcacaggcttacttagaagtcatgcttttgttgctactctgtcaaggtgctgcataaaattaaccaccagccaggtatgggtggcacatgcctgtaaccccaacattaaggaggtgtggaacagaaaaatcaaaagttcaaggttgtccctggttacacaggaagtctgaggccaggctggtatacatgagacaaaacaaacaaacaaaattttaccactacaccaccaataatatatgatgtttctcacatatagttttcctgtaaatgctgaattcctataataatacaatttctgatcatgagtttctgtaatataaatgatctgaatgcctcaaaaatgtctacaccagtagagacagaaagaaaaagagtaagcacgcattttacatttacaggaaaataagtagaaatcacaactggacgattgcaggatgcttgcttggttactggattgaaaagaaaaacacatggggatttctggctgttcaaattgtattagaaaatatcatagctattacctacattttttttaggtttatagagcatttgcggtgatgcaggacaatgccctgcttctaaggaggacatggcgggatacttagggtgacattgtgatgttcacagccaattagtacttaggttgaaaaagtatggatgtattgtatatatgtacatgtgtgtgggagagaaagagagaaagaagggcagagggacatatggacagagggaggggggaagaaaggggaggaagagggagaagagaggggcggggaagagagaccaaaaaagagggaaccacaagatgttaacagtgagttcattgtgcttataaatctttctataaaagagctgaggggaaaagtaactaaaaaagaaagagaaaaatgaacacccttagagaaaacatgaattaaaaacattttaaacatgtgtcttccataactttggaatgctctgccattctaggaagctccagtgtatacataaggccttgtcacttgactcctgacagtgtaaacacagcacctcatgagacgctgtccagtgctcctcttcacctgtctagagcacatccccaagctcttcagccttcatctgtcataaccatgcatgacaagagctggcttgacctagcagacactccagtcctttatgcttctccagggttgctcaggaggcagcaaacctgacaaacaccttctacatccttcagtctcgcacttgaaaatattcagcaaagaatgtgtagtgagcattatatagaactttttcttgccattattctgtaagcaatacagtctaaattgcatctaaatcatgtaagcgatactgggtaagatttagagtatggaaagatgcatgcctgcagcatgcagactactccatttgcataaaagacttgggcgtttgtggattttggtttctgtgagggggattctgatttctctagagaaatatatctatatctatatgatttctgaattaaccaaaaatctttagacacatttaaattgatgaaccagagcacagtactgatgtcccgtgttcttctgcccacagcacactgtcctcagacctgtccttctgaaaagttaggcttagttcccactctgtggcccctgggcatctcaccaaagagtaaacctccttccctgatccaagatactcctgggacagcataaggaacagagatggaatgttctctttggtcctttctatatcaggctcacaggctataattagtggttatgtggggagtgaggccgagagcatgcaaggagagcagcaggagagagagaaaggccatactggggatgctagagggttcctagcagatctgtaagtgataaaggccagcccttagtgtgtgtgtgtgtttgtgtgtgtgtgtgtgtgtgtgtgtgtgtgtgtgtgtgtgtgtgtgtgtgctttcagaaccaccaagatgaaggagtgctaggttcttgccatattgacaagatttctcagggttggagttatcaacccctcagtttcgagagcactggctgttcttcctgaggacccagatttgattcctagcccccatgcagcagttaacaactggcagttctaacgccctcttctggcctcattgggcactacactcacatggcacacagacatacttgcaggtaaaacacccaaacacataaatatatatatataggaaacaaatatctttaaaggatttctcagaaaagttgaaatcaagctccaagagagagtgctagatatttaatttcaagaagttctttttcaagcaagaaagaatagaggatatcttcacaaaatgaccctaatcttacgaattcccagattattctagttttatcattctctaaatctaggatagaatctccatttcctaaataggcaaagttcagaccaactggtccagttcctttgtttataaacaaggaagcaagatttgagagaggcagtaactcagttgagttacccaacttcatagccaaagagaggcccaattccaattcccactgtgctctctgaacaggcttcgggaggatcagtaacaaaccttctgtatgtgggtccatttgctggccccttgtgacttagagtctctgggaagatggaacacccacattagatagtccaaatttgaggtcactgttgaagcattaaaaggattttagccactgtgattaaattttaaactattgatggttattatgttaaacctaggtcaaatttactttccatttttagtacaaaagaaagattttaatgcagaagaaaggggatttatgtaattctgctgagataaatttaatttacattttagaagaaatttgaatgatggaaaattaacagggagatttcctcttctactccacttgttaggcacactccccaaagttaatcatttccacaattgtttgctccttcatgaataagtaatatagagtaactattttagtactggggacagaacctagggccttgagcatgctggccaagtgctccacactgagcacattcccagccaccatctccatgctgttcgttttaaagcaagttctcatgaagttattcagattggccttgaactcaagctgtgaccaaggaagcactggaacttgtgagtctcctgccttagccaccagaccagctcttgtcactttatacacatgtgtaggaggaaatgctgaccatgcccgcttgggggctggcaactgaccacgcacgcttgggcgtggtcagagtgatgtagcaaggctttgagtatcagggacgcacgcatgcggctctcttttctctcttccgcctggctgaacaggactggctccgtcgtgtgagtactttcttaataaactatctgtgatcaatctagttctgactccatgtgttccactttacacgtgcacgtcctactgcttccctttctcgtgcctgctatgttgtgcaatcgttattgccaacttgatacaacctagagtcacctggaaagagggaacatcaaaggatggattatcagggtcagactggcctgtggtcatgcctataggagaatgtattgatcaatgattgatatggtaatgttcgacctgctgtgtgtgtcagggtccctaggcaggtagtcctgggctgactaaggaagatacctgagcatgagccagaaaatgagccagaggagagagagaaccagtgggcaaattcctccatggttccccgtaagtccctcagtgacagactgttacctggaagtataagctgaaacaagcccttccctaccctaatttgtttttggttaaaatgttttattacagtaacagaaagcaaactagaatgttggctatattctgatgatcactctatataaatatatacagtcccatctcactctcttaaaagcaggcatttgaacaaccaaaatgagccctttttatataactgtcagaatatactcttccagttttattgtatcattcctgtcactggctagaaatgcattgtcatgctttgtttgttccaatttggaaaataaatctccaggaatgcccagcgagttgagttctctcttaggaaaaagaaagaagagacattctctactcagacatgcccatcctgctccatggaaagctcctcagtcctccccctgtgctcatactcttggtcccttgactatatgtaccctggtgggagcactggaagagacagctatggaaggtggccaggtatcagctagagagaaaggaattcaccaagtgggctggcaatgtaggtcttgagataacctacattctcatcactggctgcttcagtcaaactttatgggagctaatgctttgaccaacacttgagaggcatgaagaagttgtgagaagcctaccagccaatcaaaccacctggactctattcagccccgatgagtaactttggagaagttactcaacttctataaaccttaaggtctattaaatagggcacctgagagaatccacattaggagattcagaatctggcataccatgcctggcatggactcaccttcatcctagtggcagagcaaatagggtccttgtgatagtttgaatgtaattgcacccaatatcccatagtcccataatctcatagagagtggcatgattggaggtatgtctttgaggattgctatgctcaggatacagcccagttgacttcctgttgcttgtgaagatgtaattgaatgagggggccatattccagtccaggcaagcagcagaacttggcagcttcagctacgtgattctgggtttagttaagaatagaagaaaggggttatggaataaagctgctgaggccaggcatctgtcaggggtatccatgaatggaggccttagtggagagttcattgcatgaagctgtgaagttgaagcttggattgccttggggaacccaagatgttaaagatgctagaatatgggatacctggtgaggagagctgctaacaatgagtggaaccagcccaagaggaagacgtgtgttgcagtcaacaaagctgaaggagttggagacctgaagagcatcagatatggagatgcaaaatttggagtttgccaagctggttttcggtgttgctttggtccagtatttcctcactatactcccttccctatgttttggaatggtaaattatatcctgtgccattatatgttggaagcacgtgttttgattttgattttaaaggggattgcagttaagaaaatgcctgagtctcagaagagacttttgactttgaaacaagtttgggactgttcttgactatggggacttcagaagttagactaaatacatttgcatatgatattgttacaaccttatgggggtcagggagaggaatgcggtactttgaatgtaattggcccccataatctcacagggagtggtactattaggaggtgtggctttgttgaagtggggatggccttgttgaaggaagtgtgtcactgtgggggtgggctttgaggttgcctatgctcaggacagcggtcagtgtttcagttgacttcctgttgcctgaaaaatgtagcactctcagttccaggaccacatctgcctgcacgccaccatgcttcctgtcacaacgataatggactgcatctctcaaaccatgagccagcttcaattaaatgctttcctttaaaagagttgctgtggtcatggtgtctcttcacagcaataaaaacccaaactaagacagtccccaagcacaggcatatggagcggtggaaagtgtagctatgaccatggatgccacagctgacaccaaagtgaaggcatgtcagctgacaaacagtcctggcacttccacagctaccctgatcttctattctgtatgggcctgcccctgtgggtagcaaaggtctagaacccgtgaaacccctttgggcttctgggatggggacagcagtctagaaacagcagcactacccaacatgatttattctgatgaccgcatgattcacttccttgtcttatttctcaattactttagaacttggttggcaaagaaaccatctttttttttattattattaagtttcccttctagctcataaacaggctggtgtgtgtgtgtgtgtgtgtgtgtgtgtgtgtgtgtgtgtgtgtgtgtgtgtgtacacccatgcatacatatggaggtcagaggctgatgtcaagtgtctttccttaatgacaatccatctgaggcccatcagtaaagctatgtttgctgactgatgagacaggtgcagacctgtctccatcctccaagaactgagattattggcacataccaccatgtcaaccttttatgtgggctctggggatctaaattcaggtcctcatgcacataccataggtacttcagtgactgatccacctccccaggcccatgggcttttcctccttgtgcttcatcctgcctggccactcaacttgagagtcattgccatcgacttaactttcacagaaagacatactagttcctcaccaaacatagcctaaggtactggccacaatcagtctgcagcttcccacactggagccagagcccctggatgcacaaggtctctgggttatcttgcaactcaaaagccatattaccaattaccaagtgtttctgtggaggaagaagctattgccatgtgaacttccaggtacttcttgctcaatgtcacagttccagggtcaaagcatgaagttataatgagctggagggcagcagaacccacctgaagagtacacataccactctttcatcaatggagggagaagacagacatactgaggactttgaggactgatgtatgtatagatgatggcagggatttaatgtcgtgccagctgatgtccattctagtacatcaagagttaacctgacctaggaaagtaagactttcttatttaagggtaattattaacactgcagagggccccacacatcaactacccagatcatgaagagaagaaagggagggtggaggaggagaggaaaggggagaaacaatagcaaagtgaaggaatctctcaacagaacccagcaggaaaggcagagggtcctcaccagcacaaagcagcactgaaaaggctggggcaggtgttcaggacccggggggagaacttttggtctcaccaatcaatcacttctactgacttcaacaaaaaggcaagggagctaataaagagccacctaaatggcaagcaaggcaccttttgccaactaaccccattttaactacacaattatgcaagtaaatatgatgattagttttaattgtctgcaacaggacctagaacctcctgggatgaaaaactggagtttcctaggaccttgggcacacctgtgaaggatttctcttacttgagttaactgagatggaaaaccccactttgaatatgggtcacatcacttcttgagctgggtcctggactgtggatgagttaataaatgaggctccctagtcagggtgcacacatgcatctttctctgctctaggctgtgtctgagatgtgaccagctgcttcaggtcccaactcccttgacttcttgacacagaggactataacctggaactgtgagctggaatacacccttcctcccctcagctgcttttgatcagggtgttttctttcttttttttcatagcaaaagaaataaaactagggcaacaaagagccactcatacaaatgattaggaaaccagaggtgcttaaaaaaaatcagaaaaaccagttatctctttctgtccttgataaatggtatgctcacgcacaggcaaatggtttctaaccagacactataaatggccaagttagacaaaggcatccatatcttttttactaattacaggaagaacatgccaaaatagtttaaaaattgaagaatacaaaggaattgataaatgtgaaaattatttttatattactttagagtgttctaaattgtgcctgacacagtttaggggtcagaaatcccaatcaataatttgatttccttgggttcattactatgtcccatttgaaacaacccttctccatgctgttgccttgagaaaagattttaatgcagaaagaaagctttctagagtcttttgcctgagatgcactcatttaaattcaacatgggcaggactccaaaccaaccctaagcagggaatttagcctttgtcttgtgttcattaggaaaccactagggttcagagaagacagccctgtggagagcactgaccccatgaccaccagcacccaccaccaccaccaccaaccaccaaaacctccagtaccaatcacaccactcaccaccagtcaccaccaccaaccaccttcagcccccagcacaactcaccaccaccactcatcaccagccaccagtacccacctctaccaaccaccaaccaccaaccaccagcacaaaccaccaccaaccactaccacataccagaaccaagcagaataactctgtcatgagaaaagcagctgcaaagagcttggggctggcatgttttatggtcatcttgaatattgccattttcattaaatattattcaatagtgaggcgaattcacatgttctccttcatgccttggatgatagtaaattagattaaaatcatatgactatcatctcccacactagtttggtcatttgtaaccaggctatcaaagtattttaagcaactttatagaagaaattgctgtatcctacattatataaatcaatgcatcaatgtttaaacaacactcgctgctcgtcattggtcctcatacttctttgctcaccaatcaggcttaaaaggctgtgtggtttagttgtaatgaaaaatgcagagagagccacttgctatcatctttttctttattgcccaagctcccacatttcaaatgacagccatgcccattctagggaaagcatggattaatctaatcctctgcctgggattccagtggagaatttcttgttcttactatacaccaggtagaactctgagttctcagggaaagtatactgtgtggtttttaatacccaaggggacatgggaagcggggccctgaggttaacatttaactgaaaaccagcaactctgggccgcagcccaagtcagaacatcagccttgctgttcccaaaggtttgcagaacccgacttttcaaattggatgaggaagtgggacagaaaaatatatttaaacagatgttttagaaattagaaaataagatcttaaaataccctgagccctgagaaactatcccgctaaaatgtgacatgaatccaccatgttccctgactgtgcctcgcttcctcacacaagcttttagggtctgagacctggaactgtaggtgggggatacatagatatgtatttgtattatgtatgtacagtgtgtgtgtgtgtgtgtgtgtgtgtgtgtgtgtgtgtgtgtgcacatgcatgtgcatgtatgtcggtcatcaacagttaggaagattttgaggtcagccactgtttctggtgagaggttgatgcctccctgtagagatgttgggctctggattgtgcatgtagagtttctacttactgaaataattgtttagttaaaccaaggacaaagaaaaccttaattggcttttagttcacagcaatgaagcctttccttaatttattgatgaatttctattttccatttcttggggtgtatgtgtatgtttccatagctgggaatttccatgagtttctatgagtttccccctactgcttagttattaactctccctataaaacttgttatttatttatggctctgatgagctctaactggaggtaagttacaggagcctggtacactgcacagttttctgtaagccagagggcagggaagcggctgggaccggcttccggggcaggtggcaaccttccggattcctaggaagcatcacatctagaagcaaagggctcatgagaatctaggtgggttgtcctgtgggaggctcagtttctaattatccacacaggtctgtaaacctcaaggatgaaaacatttgtgtgagtcaagatggcctgtgaggagggctctaagctcaatgccatgggctacaaaaaacacggaacccgtctgatttcactgaaaagtcaagaggaaaataagcaaacgcctgtggactatttagttcaggagtcacatgtcctaacatgtttataaaacatgtcctaacatgtttataaaacacgaagcctatcaacagggtgaacaaaggcatgtgactcatgtccctaaagtgtgtaagtttcaagaaagtaatcaaggctatctcttaatctgaaaaacaagttggttaaaaaatagtaatctaaatttctttaataagccatctttcaagcactaaacaaagatttcaacaaacctgaggtacgatgatgtcactagcactcaaaacgctctgcagaggcctttggttcacatccacagacttttaagcattcccagctgtgaaaacacacacacacacacacacacacacacacacacacacacacacataccacacacacacacacacacacacacacacacacacacacaccacatacaccaaacacaagcacatgtacacacaccacatatgccacacacaagcacatgtacacacaccatatacgccacacacaagcacatgtacacacacacacacacacacacacaccacacacaagcacatgtacacacacacacacacacacacacacacacacacacacacacacacacgataggcaacaagaaatggaaaatattcatggaatattcatcaataagaaatgaaagctaaggtttttttcttcgtccttggtttaactgagcaattatttcaagttatccagtattttgtagagaagatagcacatagcaactatctatttctttttcttgagatagggagttacgtagctgaggctggcctggaacttgctatgcagcccaggatgacctcaaacttaaatcttcctccttccacttcccaagtgctggggttacaggcttgtaccactacagccagcccaaccagttcttcattttatgtcttaaacgtgagtacttttttatggtttcatattcagattcaggactagctcacagagaaagttattagaattaataacagataagagaaaagcaataaggaagggatggaagaaaatgacctaaacaaataataaacaagaagcaatttttggtttcaagtttgcccactaatcagcttacatcacttgggtaaagtttaacccggaaagtctttattttgctcatgtgccctgcacacagggaagactgcactgctgaatagtgttgccactaaatttcatgtctacctagaccttcaaagtgcaatctttttttaaaaaaattggtaatttcttacatttatgtatttttacattcattggtgttttgcctgtttgcatgtctgtgtgagggtgtcagatttcgtaggactagagttacagacagttgtgaactgccatgtggatgctgggaattgaacccaggtcctctgaaagagcaggcagtgctcttaactgctgagccatctctccagcctctcaaagtataatcttattaggaaatggtgtcactaggaggtaattaaggtcatccttggttagaggtggccttgtaagaggcagatttgaacacagagaggacaccactatgtaagcacacggatacacaggggctccatgtgctgatagatgcagagactggagtaccatgtggacaagccaacgcaggccttggacttctaataaccagaccagggggaaagcaggaaatggatttctttctagtgcctccagttggtgccaattaaccttgacttttagcatccagagctgtaagagaataatcttgtttgtaggcaccctgatggaggtacacagtcgacgcagcctgaggaaatgaatggagaccatagacacacagagatggcctatggaaaagagtggagaccaagtgagcaggataaagtgatggaatgtcaaagcctcacacaaactttttgtttcaaatataaactcagagcacttttaagagaccacaaaggaaaaccaaacaaaaactgaaacctagaggtcttgactaccaaatttgattaggcttcacaagcacacatcagcaagggaggcaaaactggtttacacttgagccttctcatcagtagttctatttataaacccactcctgaatcccaagcttcaccagctaccctaccatgaccaacaaagaaactgcagcctacagccagggaaaacaatatgaaggaaatcaccagcaggccattcccatctcgcttcctctctgaaagaatcagaaatctccatagaaagcctgattttaggatgctacatagggtagcatggactgaaacttgtactgaagggggccacggatgtgtgaatcttcacaatcgtgtatgtctacagcatcccaagtggcttagcatgcaccttgcacatgtatttctgcatattagttcactccacatgcttccagtatgactgctggaagttgaactacagttaggacatagtccttcacacgacctttgagactataaggaaaggatggtaaatacgtgagttgtaccaacaacgtgacggtgtcaacaatctggtgcatattgtatcctaaataaagaattgccaagaaataggcttttaaatacttcagttgctttgaaacgttctccgttgtatacagaagatacacatgagtacaggtgccaccgtgctgataaaattatccatcctgaagcacatacagctctgcactgttagcatcgacatcatttttaaagagattcacgagaggttcatttgacatagaattatttcgtcaccatgccattcatcatacagtattgattatttgaaataaaaacatttttttttcatttttaaaagtcagggtgttgctatgtagcccaggctgcccttaaactcatgatcccactgtctctgtctcccagctgctagaattataggcacctggctaaactcttatgtctaatctggattcttagtaaactccaatttgttccagtgtagcacaggcaattctatttgccacccccacccttcttgccttttcttttcccttcattgttaggagatttgcatcactaatgaccagtgacagaaagcaagtatcagcttggcatgctcgcatcatgagagcactttgctagctgggacacgagaactgctttcataaaatgtcacttagttcccaagaagggccagctcccaacacaaacaaacacaactgattctctcagtagtctacagtgcattcgtgaaaatgtttcctgagactcagaactcttgaaaagctagatgctgtaaaaccaagcaatggtctctcggttcaaatggaaaaggacatcatcttgtagaccctgaaatgagcaacctcaacaaatgccctagtttcagattccctgtatccacataacaccacaaccttatttcctacagaaaatttctagcagacataagatcaacaggattaactaaatccattgcatgccctaagtagctctttcactacagatgcctccaccaaagcacttagcaaacctttttattcaaagattttcattgacctcaataggaaggcgtgcattcacacacagagtcaaccctcccaaccacccaatagtaaggtgtgcattcacacagagtcaaccctcccaaccatccaatagtaaggtgtgcattcacacagagtcaaccctcccaagcatccaataggaaggcatgcagtcacacacagagtcaactctcccaactacccaataggaaggtgtgtattcacacatggaaccaaccctcccaagcatggtaccttattctgctcacacacgtattgtattctcagggtgtccattgctctgatcatggattgcatggcagtgaatatgttttggtaaaccagcttcgtgaagccctttctatcttcatcactgtagccagacccatggattatcctcatttgcttgataaaggtgcttttcccactttcaccagttcctaagagaaaaacaatgagtgaaagaacagttagcagacagactcccaatctggaaccctggtagcaccagtccacaccatgggtaacagggtggtgggatgggtttccagagagtctaccagaagcttatgaggcactatattctgagccccaggaaatgccttcccatcttcctttcctctagactttgaaacaagaaccctgtgtctaacacgaaggtcttgttgctcatcatgacattggcaggggtggagcctcttcagtgtgcaggaaggatctgagcagcaaaaacacttggagaacatagctaacttgccaacatgtccttggtcctggcatgatgaagcatcattctcagtaatgccaagtgtctatatgcttgttgttgttaatgttccaatctatatttcaggaggtctcctcaactcctgacactggcctggggcatcaagaagtataaatcattgaactataccatagatctttaatataatttttaatctcagattgaggttctgctaaaatggcagtaaaaatatctatacaatgaagctcaaatattttctaatattgactgtgataaatgggattgatgatatgagatactcagggttcattccaaatctatgtgctgcttgaaatttttaattaacagttgagttaatagggtttccagttgaaatgaaggagaaactatctccaaattgaaattaccacaatacccttaaaataaatgtactttacagagtgtaaattacatttcataatttgttgcaaaaagagaataaatatctaatagtatttctgtcaaaagaaaatgttatgtgaaaaatatcaaccaaaacatagaaattttgctataacaaagactgaagattatttttcatgaaatgattgtcactgtctatagttactcactttctagttctcaacagaacactcagattatataattgtcatgaaattctatcatctctggtactttattgactcttagtcacaaaaaccatgttgtgcatatctttttacagtttacttatagagatgtgttttccagagtaggaggctagaattcatgatagttactaacttgattaaatttagtgacttttaagcttatatggcctttcccacacatcttaccagggctcttatagcaaaggcctgagtgtgacaaaacttttaaggattttatgattcttctgataaacatatctaggattgattttgtcaagcacacatttgctcttctgtttgtgtctttattaaaccctcactgtatccccctcctctcaaaaagacaaacatgagcaagaaggcctggtggtgtgggcccactgccctcagcagccctcccttctccattctacactccagtcatgttggcctgctctcatactgaccctccttgagcccttcacacaggctgatctctcttcctggactttactcttggccttgcctgccctttctgatcaggtcaagttcagtactcagggaagacacttacccacaattatgatggattttctcacatgaattaaattaatcaagatacttctagccaggcattggtggcacacgactttaattccagcacttgggaggtagaagccagcctggtctacagagcaagttctaggacaggctccaaagcaatacagagaaaccctgtcttgaaaaaccaaatatatatatatatatatatatatatatatatatatatatatatatatatataagatactccctcacagctgttatcacaggctagcctcaatcttgacaatctctcacaggtatatctgaaggcctgtcccctcggtgtcaagttgataatactaaccattatacaccaatgctggcacaacatctatgctggctctctttgtgcctggtatggcccctgccatttggtaccatatttattaagataaatattgagcagtgcttgatgtaagttgtcttcctctctcaatctccacccaattgtctgagtcagggtctctcacagaatcagagattcctggaactggctaggctagctggtgggccagtaagttccagagatctatctgcctccaccttcccagctctgggatcttagccatgtgccaccatgcttggcttttacatgggtgctagagatatgaatctgggtttttatacttatatagcaagtattgtattgactgaataatgtctccagatctcttcttaattatctttaactgtacagttcagaccagtcttgttaaataattgagtgctgtgcaatcaattgtcagaacccttttaatcttacaaaactgagccccaccccagccttggtaaaacacccttcctttctgctttgtcaatctgactattcctgacacatactctatatgaagttatacagcctttgttcttttgtggctggtctatttcagttagcatcctcaaggtgtgttcatgttagcatactcagcagtccttttctgaatagaatatctctaaatttttcaaatacaacatatgggaaaataggatatgccaattctctgtgcccagccctgtgttctatgtgtgtcaaaggactccaaccagatagacaagaaagataaaccctttagaagaaccatactctgatagtccatgccctcttctgagtgctacttggatgctgatactgacaaatattagagtagtcactatggctagttactctatccaaatcatcatctctaatcttcagaccactctgaagtaagtactgttgtcttcagtacgcaggagagaaacctcggagatagactggctatggtctgcaagcacacatagttaacaagacctgaacttgattcacttgtactccactgacagtctctagcatcagagaagatctggctcataaaccaaaggacctggtgatactggcctaataagggcaaattgtaaatccagttgcatactatgtaaacccagccaagccaccatcttacagatatatcctgctcagatcctgctgggatgtgctccgatccttcttgggaagctccccatgcacatgcagcgacagttttagtatttttcttcctgctattcagctctcatattaactagattcttctatctccacccaaagaactgaataagactgaacagagtatagaccattctcctaaagtttactatcaaagcttggtccaacgttctaggccagatcagatctccgttcccacaaaattctgggttgccactccttgatattacaatattctcttcctactagtgttgagcctccagttcatcagttcatccctaacaaacatcagtaatcctatgtattacagatgaagaagtagatgtgaacatggagattatgtaactgcttcaagcaagctctaactgtgaccttggaaccagaaaaccgactcaagacagcctgaaattctgccgggagataaggaagctcccagtaacaggggtcattctctcacacaaggacaaggccagtcacaaaagtttcaaaagccactgatttctttcattaaaaaattgtttagaagagttttaagattaaatgggaaaagtgcataacaatatcattattttaaaatactctttgaatatttggtttcaaatggcagttgttcagttaaacacatgtacacacataaactcgctcgtgtgcgtgcacacacacacacacacacacacacacacacacacagcaaaataagctagtttagagggaaagaagagactgaatgacatcgactactgagagccaagaccaagaagacatagaaaccacttggtgggcatgctctcactctcactgaagctgccaaacaacctagctggtgccatctttctccagaagagaaactgagaatcataaagatgaaggaggttgtttaagtttgcccagcatgttagtgttggccagggtctgaatctaggtcggtgctggtacatgctcttcccatgacagtttggtattttcctgaacaatgggcctcgtttcctacacaaattgagattacaacagcagaggcttagcctttcagcccacagaactgccctagagctgagctggctccaacagcagggggcagcaggcaagagggagtgagggcacgtaaagacatcctgctttctaaaatggcagctgtggtgagggctgcagggactggagctcaagccaaggatctgagctgatccatttatctatgacaaacaggaactccacatgggggcttccagcattcattcattcattccttcattcattcattcattcattcattcattcatgcattcatttattcaggaaacataaaaagaacacccagaggcatgatcctgggcatgaaaactactagtcgtttttcttgggtggttttaaactgaggagtgggttgcttatcccccgaaccaccaccgacttagccagttaccttccaaaacatgggtttaggtccatgttgctgggctaaatgtgcccctccagaataagcctgctggagctcctcctgagaatgcagaagagaaggaaccggcagtccacagcagatctttggtctaaacatgggccaagcattttggttgggaaatgaattatggtgtcagattaccaaggattccttcaggtctgatgaaggtctcatcctaaaaggaggctttccacccagactcagcatgtagcaacacagaagagggaaagaatcaagtagcaattccatgtatagattcagttttcaatacaactaaggaaaatggtgcttctccatttggtttccatttctccattttcctatttgaaaataaaatccaatgatggctattaagtagaggcataaaccactaaatgacatcccagccaacaaaggaataccagtgtacatacacaatgggtgtcatatatggtgaactaaatcaaatacccatgtacacaacaggctctaagattataacaaaaatgaaaaattcccaccatgctgtattgtcactattacaattgagaaatgctcatttacacaaataccactgtgctacaactaccagtgatacaattgccaggacagtgatatgttgcatagatttgcaatctgtgcacacagcctaggcatgcagacactgtatcatctaggcttgtgtaagtatactctattgtgtttgcacagtggtgaaattgcttaatatgcttttcagaacatatgaccatcattaagttaggcatgtctgcagatctcaattcttactggtgtcaagagcctgcttgtgtgagctgcttgtttgtcatcatctcactgcgcctgtggaataaccctctggacactacgaagatttgttgctctcattgttaataaagtgagatcaaattattggctgatgactaggcaggatttgcagggcagagagaacgctggggagaagaagggcggagtcagaggagatgccatgagatgcagagtaggatggtaagcacatagaggaggtaaatgagcctcatggcagcacatagatgtggaagcccatagtgactccattccatcttgacttaaggtagagagttcaagtttcttcttgctcctcaaggtcaaataacaggatgtttggccaaaagtatggttagtagatgttttgagaattaaggaaattaaggaggtggttacacctgtttgtctgttccttgaaccatgaacaggaagattttttcctcccctgccccccccttcttttttttttttttgcttttagagacagggtgtctctgtattgctttggagcctgtcctggcactcactctgtagaccagattggctcaaactcacagagagccacctgtctctgcctccctcatgctgggattaaaattgtgcaccaccaatgcccagctggacaggaggccttttgccccccattttgctttgggtataaaagggctctgtggcagtatttactgagagacctctatttttttaaatattttatttatttattatgtatacaacattctgcttccatgtaaatctgcacaccagaagagggcaccagatcaaactacagatggttatgagccaccatgtggttgctgagaattgaactcaggacctctgaaagagcagccagtgatcttaactatctctccaggctgagaggcctctatcttatgtttgtttgtttggttggttggttgtttccttctcaatcctcactccccttttcaggtacatttcaacaggtcagctggcccagacacaccatgtgggatctctaaggacaggaccttatttttcttgacagagggtacactagtaacctaaaatctatgcttgaatggatatttgtggatcctagacctccgtgttgattcccttttggaaagcagtaaggtgggggtcacctagagtgggaggacctgttggagagacacaagcagctctcctaagccaggtgcctgcgttatggctttctgatgaagacttggtgccaagcacactgtggaggtctgtgtcaagtcttttgtggagtccagataaatccactcaggaaagaccttttgtcctctttaagccacagtgttctcacctgcagagacctgcccagaggacagtgttgtaactttgtttgctcctctccagcttgggctgacctcaggcggtggaagtttctgcagctgaatgggctgctgtgctgaagtttgtcattcagcacatgggggtttatgacaaaggctggcaaatcctggggagagctaaagaactccccaagtgaaaagcagaatgcactggcagaggactcagtcaaaatgtagattctttgcccctcctcagctgagtttcactggtctcagtaacagcctgggaatatgcatttgcggccagtagtgttttagaggtttctgtgggctggacagactgctccagggcccttcggaagggattcctgataggatccacctgggacagaaacgccccagctgctgctacatcgtgttcagttgtgttcatggatttttctatgaagttccaaattcattacttcatgaagaaataccctgggtcccaagctctactcgtccttttccagggagaacatgtttttaaagaatcaataagattcacatactcaattctgcccaagcctcgtgtcatcataaaaacctgacaccttccctagcttctgatcctacacttagaggactctctgcttttaactgtaaaaggaggttacaacaactgaactggaagcaactgcagacagattcatggccactctttgagcaaaagaagttaacacgaggcttttaaaacaaaaaaggggaagttgaaagaaatcaagtgatgaaatctaaaagatgtttttttgtttgtttgtttttgctgtttttaaatggagaattcagaatatactgcatcatcatacttgatgatcttttggatttattcaaatgccccattatctttatggactagacaagaaaagccatcattctaagctcagcaacccttccagagacagatgtcatatccgtggactcaatcaactatggaggagaggtatttttaaaaacttcttttaggaccaacaagatacctgcccaaaagtaaaaaagtacctgacaaaaagcttgatgactttagttcattctctaggatccacacagcagaaggagagaactgactccttcaagttctcatctgattccccagtctgcccagtgccacatgcacagctccacaaaataaacaaatatgcaatgaaaatctaaaagaccccccaaccatactgatatgtagactcatttcctatcatcagttcccaaacactgccatgtaatgactagctcacattcccaccttatcaggcgatcattggtaatacagagatgagctaaggcacatgagagcatgcaaacaggtttacacaaacacagcaccatttaactgcaggagagaagtgcagtgccttttgataacctagaggggtctaggaaccagtccctcaatggatatcaaaagcaagcatataaccctttatttacttggtgtcatcatggatatgacttcaagttcaaagtatctttgagaagttcttttttaaaaaagatttaaataaaattttatgtgtatgagtgtatgtctgtgtaccacatgcatgtctatgaaggtcagaagagggcaacagatcccccggaactagagttagggatggctgtgagccaccatgtgggtgttgggaattgaacttgggtcctcaacaagtacggtaagtgctcttaactgttgagccatctatataactccctcacttttggagcaaacaaagctaaagggccacactagtgagcttgtaaacacaagtactttgaattcttagtttttaagtgtaaggtatagaaaagaatgcacttttcacatttgctgtcaatgcatttaagagttcaaatagagagagacttcataacgttgcttttgtggcacagtcctgtgatccgggtattcaggaggctatcataggagagttggaaatgtaaggccatcctgggctacttagtaagaccctggcctccacatcacctccttaccacgccaaaagggataaaagaaaaagctatacagtatgactcattctgtgtcaacagcccatttataagaccctttgcaacaaaaactccactttgaagcattctctagaccaatattcattttcccaagaaatgaatggatcacatcaatgataaggcgagtcctacccctgatgtgttttatggctaacagataaaataccaaagactccattagcatcactcattcttcttataagatcatgaattcgccttctgctgaatgagacggactcacgatggatttatgaaaagggcagacatacacattttcatgaatagttttagaacctcccacagttcagtgctgcttctgaaaattagcacctccccccacccttacagtaacattcattcactggtgggcagtggctctcaggctgtgagctgctgagggtgctctaacactagagggccgactccaagcgagcctgcagtcagaactgcccttgcccatcatgacagctgcttcaaagctggacattcactcgtgttgagagtggagaaaaagtagaacaaggcatcaaggaaaagacagaatccctgaaaacaatcgagaaatgatatccttcagtccacatgagtgatggagatgcaaggagatgaaggaaccattttgaaacatcatgagattctgttgaagcacagatgctcaaggaagccatagtcctcaccccaggataaattcaaatcacatgaaataaacactaatcaaacactgctacctgcctgctggtgtaactaaacatgaggtgatagcaacaatgaaaagacaagactctcattatggcaggtctatagaagtacagtatcccattatccaccttggaaatgttaaagagattaaagttctccttggaattctgggaaaattatgaaacaattttattcagactaatacctacacaagtaggcataaaatttgcattctgccattgtgaccaaacacatgaatttacctttgacatatccagtataagaactgagcagctggggaacggcaatgtagtactatttgccagaccacgcatccatgtgaggcatggcccttgccactgttgggtttatctgacagatagctattcacatcctgaccaactcatctaactcattcccatactggtccagcactaccattcacaaatgctcccagactcctggaagacactcattctcgtatccctgtcacttctctcccttatgtaccattactgtgacctttgtcatgtcttctcatttcattcaggaaacatttgagaattattcaacatgcctctcattgatatccaaaaactccttaaatatatttattctattttcaaaacaatctaaagatttatctttgacagttaattttagtttattgttctgacttgattgagtggaacctggaaaatgggtccaccaaggtgtaggatttctgtaaatatattggatggtgtgggaaagtggttttggggggattaattgaagtttggaagaatgggataggaaaagattagaatgctaaaagttaagcaaaaatggatgattctagtgttctctcagaagagtattgatggaaatacagataataaaaggcatcctggcaaagcttcggatgaaagcgaagactctattggctggtctagtgtttgctctagtgtcagcatggcggtggctctggctccttttttggcctttttctgagtcttctgggaaatgatgcttacaagtaatcagactgatatcacaagaggcacagataatactagatactttccttctttcatttttgatattatagtggaatcgtaccttttcccacttactattcctccctcactagatgctttcagcctaatttgcaaaaagaatttggagcaaagatgaacagagaacaaagccttgaaaaatgcacagcttgagctaaggaaacatcctgaaagggagggcaaaagaaacccaagagccaaaggataggaaaatgtgcagcaaaaatgtcttccagatatatcacggctattgcattcaggaactcacctcaagtctttatataagaatttcagaacattggggcctatcaacattttgctgtgggtggtagagggtccatgaagccctcccctaccctgagggattgattattggtagtcaatggttgtaaggttaggagtgtcattttcttcgtcaaagtagccactgctaggctgtccatgactggtaaatagtgtctcatccatgattatgcaaatagctctaaattcaccgggtcacatacaaagagaagacatggaagtgtattgggaagtagaaggtttgcaggacaaggagagagaggaatggggtgaagatgactaaaattcattatatgcatgtatgaaactgtcaaagatttttttttaattaattcacatggtcagaaaagcaaggtatatagaggtgcatccagaacactatggatactgaagaagtgtgaaccattgaaaagaaaccacatgttttgcattggtgcagtataaaaacacaacagatgagtgggtctcagaaatcaggggggagctattacaggctccagggtatcaaaatgaaaaattgtttcaaagacctccatttgagaagagaacctggaggtatagagagcacaaagtcctggtgctcacagataagctctagggaatccagtaatgttaagcacacagggtttctcttcaaaggaaggagatgtgtacctggtttctgcctggatagctgggaatggatgttgttaacagcctggtgatctgtgttatctacagatataacagagtcaggccacacctgaatcccccagactattacgtttgtttatcctagactcttctccgccctgtacctttatcttgagcatgccttctcagtcaacaaaacccatccttatgagagatgtcacatgtactttacaaaggcctacgtaatttctgtgctatctgtagggccaggccactcctgactcccacagacgactgttgtttgtctcagtcattctccctagacccttatcttgaacattgagtcaacagaacccatctttatggaagaggacagacatactttgttaaagagtttcaatgtaaacaagtcttaaaatttgttgtacacacaggattgagtttctatcatcatgaaacttctttccaaaattattttatgcttaaatatagctaaaataaactacctggggttagattctagaagtttgaacaaacactgctaagttgtgttgacctggaattcctacttgcctcatgtggattgttactctggtatttgcagagaccctacatacagaggtggccctgcatagtgccaaatacccagggatttgtttcctgatttttagctagcactaaaaccatggttcatgttggcccatgtacagtttgtactggtggcaatctttggcattatctacatgactagttttgcagacatgcacagtggagttataatatcataaagacctccacctagatttcaaaggaaggctggggaatcctgattatgtgtgatagttactagttcttgcaagcaggccatgacagggacactgtatggagttatgacaataaagctggaagtgaaacaggggccttagaaagagcaaatgcactatgcttgtcagagaaggatacagacagcaagcagagccagcctcagagagtgggttaggttacagtcagcaagcttgtaggggagcagctgcctgggccacatcatactacagtatatgggcatggaatcaagagatatgatgtcctagtattacaaaagctaaccagcagtgagggtgtttccaagcagcctccagttagatttctccacatcttgcaaccagggtgtatagcgtcttcaaccgcagagtcttatcttctagctctgtgaagtaaccaagaggaatggcaagagcctggaccatgttgcctgctagatttcatgaaggttattttatcacaacaacagatggctactagctatattaattatctatccagtggtcccctaaaagcgtgtgtgtgggtgctttccactgaaactaaaattgatgtagccctaaaaggcctctaaacataaaagaaattttattgtcatacagattaagctctttattttcaacccatcatttggtgggattccctcactgtaacaacaagatgtttaaggaagcaaagaatggtctgaggagtcttctttcatttatccctatgatacaaatgtgtactcatggcccactcctcaggaagtcaaagaaacatggtgtagcacgataatgaccacaaggcaacggatttgagagtgtcaatgtttcagtggagctaaggacgtatgtgtattacaacctccaactcttctttagcattctagtatagccttagatgagttgcttaaacactttgaagcctgattttgacaagtctttaatcccagcacttgagaagcaggtgaatctctgagttcgaggccagcctgtctacaaagtaagttccaggtcagcctgggctacatagagaaatcctgtctcaaacaaacaaacaaaggaatgtataataataccatccagtcagacttactgtgagaattaaaatcacattttaaagtagaaataagaattcatacactagttacaccaacttataaaggagatgattgtggaaacagagataaagaagccaatgtatattagcttgggagagactgcatttaggaggcaaagatacaagcaggaaggaattacaatctttgagattagtgactttgaggcattttttaataacaatggagaaattttaaaaaaatggttttaagctgtaacaaagaactacagccagtggcttaaaataatggtgatttgttctcccacagagggagactacagagtgaagaaggatgtgcacacaggaaaggtgaccttacagaggccagaagcctggtcatcaagcacagtgagatatgcttgtgaacaggggagaagcagacagacagccgtctccctctgagggagaacaaaccaccaaccaaatttactctgagtactacatcattagtcacacccacaaagaccttccttctgaagaaggtcacacttgtgcattctaaaccatcatgaatttaggggctacagtctacgaaacacactagattaactattagttagctagagtaactattagtcatggtaggattttttacataagtggcaagagtgataggggattcctatacattttataagtgtaatgaactaaaaaaatgtgttaattctttgagaatttcatatattttgatcattctttagctaattcctccaagatccacttcacctccctagtccctagcttgcggttccattttttaaaaaaacaattgactcaaatttgtgctggccacacttttgggtgtggggccattagatagtacacagagagacctcccaggagccccagcatttaaggaaactcactttccttcctccagatatcatctagtgcctgtagtttctcacttaggggctgtgaatcccttccctcccccattgtagccaacttttctgttctccattatggaagaagagggagtctcacatgtcctcctgacaagcaccatttggactttttctagcatgttcaactgtctctttaacttttcctctcatactttgttttatagacagaatctcactcctgcttgtcatggaactcaccatgtagagcagaatgacctcaaactcacagagatccatctgcctctgcctcttaaagttggggttaaagttgtgcacaccatgcccagatacattccttttctaggtgatgttttcttagctaaattattcgagggataaaggtgagccagcatcgggctttaaaagcttctgcaccaatgtagtggtgccagtttaatttctttaccagcgatccaagtttggactccggtatccaatttccatttaatttggtggaagcatcattcaactcccttaatttgaaagccttctgttaagacatacattcttctcccgctcagcctatgtctccctcacctgcccttggtctctgctgtcttgtgagcttattcacacatttttggaactgctcgagcccagacagcattttagattctcccctcccttccaggaccctgaaaccagctgccttcccttcagtaccactttattccatttcacccccaactcccttccttggcaactatgagccaaccattctctcttagttatcagtggttttgaaaaatctcacctcagcttccatttttgccacaactagattaaaaatagttttgtgctttgtgccctccctaacacctagcccgaccacctgcagaggacagacattcaaaagcttgctggctgcaaagttcaagtttcagagaagcaacagcagcctgcgatgctcctgcatgccagggtttgtcacagtgtagttagggaagggagctcaaattcagactgcctgactgtggtcctctttcatattctccccactcaagagaacaaagaaactacagagctgaatggacatgtggatgtgtagtctatactatctcctcagcttccagccttgctctgaggagctcaggaccctgcaatctagaagccacgagcccatctatggggcttatacaggcttgtctccaacctgaggaaaaaaatgccactggggtacatttccataggcctgcagacaagatggatgtttgtgaggcagtgcagactgggcttgaacacgctaggccaagtgtgcataaagctgtgtgggtggaagagccagtggggactccagccagggctcacatcactcttctccagctcctgcaagtgcccaacaggcactcaagctaaagagaaagtagcactagccaaatccacttgtttccaacatctatccaggccatgttttatagtctgagtacgttctagtgtagatgtactcagctaattaaaaaacgacacactaaaacagatcaaatcttcacctttaagtccagaattttaaaaactgaaagagactttgcaagcatgtaaacatggtacatattgctggttaaatgcactaagattattctaagttagctaatatttcagactagccaaaatacccaggaaaatcaggaatgatgtcctgtggttacatacaaaacaatatccaccacacaataaccattaccatactgtagctctagcttccaaatgcattgctacaaagtgtgccatcagtttgacagtgctaataaaagtttacactatcttgaaagtagctattttatgtcctataattgaaccatagtctccacattgaaatccaaacagaaccaaatgcaagagtttggcaggatttctccaaggtcaagtcatcctcagtagaaacaaaatgagttccaggtttcaatgcacataataaaatgttgcccccaccatcggctttaaacactggacttttcttttccttctccttctccttctccttctccttctccttctccttctccttctccttctccttctctcattctcattctccttcttttttacagagaaactgtgtgtgctggtaccatgttgatacattcagtaagtgtcatttcattgcactgaaattagatcttagtcataagaggggggtaaaaaccaccacagtcctatatggcatatgaaaacaaacctcaaaccaaagactgatctacaaaaaaataaatgatcaacagcttcaagaatttgagtgtttaacactgcactggagatattcatgttattttaatataaacacataaaactctccatgaaaatacaaagaccgtattagagaagaaatttgacatagtaaaatatttatattattcatgcaaaaagcaattgattacaaatcaaattttaggaaatgtttgctaccatgtcaggctctgacataatttctggtcaagaatgtttgtaaaatgaagaactgggtgcattatgtctccttcctaaatcattacaaaatgtaagtatcctactccaaactgctcacatacctagagtttattaccctggggtctaatttccattttaatatacttgagttacatatttttgtgggtttttaaatttttcatattattttatatatttgggtgtttatctgcatgtatgtctgtaagccacatgtatgcaatacccacagagggcactaaatggatctcctggaactggagttacagatggttgtgagctgtcctctgagtgctgggaattgaagtcaagtcctctggaagatgacccagtgctcttaaccactgtaccatctctctccagttccgtttttctctttaaaagtacgaatgtggatccagtaagatgattccgtagataaggaagctatcaccaggcctgatggcctgggttctatccctagaacccacatgcacggttgaaggagaaaactgactccaacaagttgttctttctgctttctggtcccatttatttaaatgttctcttgtttttccttgtggtttccttggttcttgaaaaggcaggctctcccacatggtccccacacacattcatgtacacacatgcacacataataaacgtaaaaacatccttttttcctaaagaaattcaaataattcctaacccagaagctgtgctccattgataacaacttgcaaatgaaaaattagtatccctcacctaccagtggtagtgcacacctttaatcccagaactctggaggcaggggcaggcagatctctttgagttcgaggccagcctggtctacagagatagttccaggacagcagggctacacagagaacccttgtctcaaaaacaaagtagtaaagattagttttccctcagggagtctctctgggaaaacaaactatttttaagggtaggctacatacccaacagtaggtggccaatagaaaatgaatcaataatatatttggatgctttccaaaggacccaaaacccattaactcataatgtcatcaaggctttttttttttaattttcatttcccctttattttatttcttaatttgtttttttttaatctacaggttttgtatgtatattttggcttccagctttgtggttttatgggattcctgaatgtgtgaacaagtgtgtctctgcatttatatccttttttgtgctttttcttgggctctttttcttctgtttgttttgtcctagtcctatttctttgtgttttattttgttatattaagttttatttttatcccttaggtgcctgtatatttcctaagcagagacacaaagtggggggcagggtgatgcagagggaaggtagggaggaacttggaggagtcgacagaggggaaactgtaatcaggatatgctgcatggaaaatagtggattttcatgggctgcagagatgactcagcagttaagagcacccagtttcaattcccagcactcacatggcagctcacaactgtctgtaactccagttcaaggggatctgacaccctcatacagacatacaggaaaacaaagcacccaatgcaaataaaaataaatagttttaaaaataaaaaaaatctattttcagtaaaaaaaaaaaggagagagagagagagaaatacaaaagtgtagcacggataatataaacctagagacagatattggaattcaagctgaagatcaggaaagcaaagcaaccaagtcactagagagttcccacctctaccaaggctggggcaatcgatcctgtccttaaatgtggctaatagcctgttcggagactctgtttctgtcttatattcctctctagtgctggtattaaaggcttgcaccactactgcccagtttccatggctaactaatgtggctgctgggattaaaggtgtgtcctaccactgcctggccttatggttgtggctagctttgcattctgatctccagaaaagctttattagatcataaacaatatcttgccacacaaatgtaaaaatagatatttgtatgcacttaactagcaaaaacttacttaaaatgttggtggatatctggggaaaatggtactttcatacattgctcttggggaaaaaatgagtcaagtgctttggagagaatttggtgatttttttaaacaataaagtggcacatttcagaatacccatagaggttagggtaactagtaaggcactatgggagaggaagggaccttccaagggaagagatgtagaatacaggggtataaaggaggggaggggaataatacagcaagaaggattatgccatttgggagccacggagccagggagagggaggagtgtggagaacaataattaacactaaaggccttttggaaaagtcatacagaaactgactactgtagacacttcttaaaagattttaatggacttatcctataacaggggaatgctactctaattagacacactatcagatttaaaaacaaaagtaccaggaacacaggaacagcttacctttttttgagttgttagccaatggggttgcatagacctccaaacagaatgagttactgacagtggtcttgatcacactccagaacttgatgtaggtactattgcttaagatacaacatccttgagtcataaaatatttaaaaaatcaatatgacactcacctagaaacttcaaccctgctggctagttttcacactgctggaaggtgctatacatgctacacaaagaaaaaaccatcatcagtctcatccaactgtgaaccctgtgggctccagtaacaactggcctggcgagatatacccagtagtgcaatagtggcatgaatgctatggaaggaaccaactactttctgatctaaggcttactccatgagatggagtccataacttggcattgttaatggggataggaatctgtagtggataggttctctgctagggcctatgccctaatactattattctgctaaatagatgtataattaaaatcagtcctaatgacttatttctatattgatacatcaatgcatcttccaacccccttcaaagaagcttattcttgcagtaaatagcaattaatacagaagccctaactggtcaacctgcagaaaataaagagattgtggagtgctcagagctaaatgagatgtttccatcataccacttgtccccaaagctcaaatatcttcaaggaaaattctaagatccagaggtagtagataatttccaggaatttgtatttttctagataccaaatggtgttgcatacatgagctcagtgatggtgatagcatgtataagacatgtgcaagttcaaagcaggcaaagggggaggtaggggtgaagtctcactcctaactgagttactaatggaatttgatagttgccaggaaaagcagagtcagtctttttcaacggtatgatcctggtaggttgaccacactccagggcgtgcccatacccaagagtacttgggcaacacaaactgtcctcagtgggttttatttatttttttaaattacaaacaagattgaattacatgacaatcccagttcccttctccctccctttctcccctaccacctccccaactaaaaccctacctatcacatatcctttcttctaatctacatctgactcaacctttcctcaatgggttttaaagaagagaacttgcagtcaagtgctgagggaagtgaggatgaatctaagaggagttgggggtgtgtgaatatgatcaaaatgcattgcatgaattctcatagactaaatgaaaaatagaaaggcatattccacaagagttactatgtcatgctataaaattactcatttgctagacatgaaaataactttatgattatataaatgaatggttggtaggtcaatgataaaatatttagaagttaaatctaaacttaaaaagagtctgttaaagatataaactcccacataaaaccattctctctttcccaaacagttccacattttaccaatcacagattgcttaagcttcatttttatctcactagtgaatcatacaaacctctatggaacatttttggttttaatcatgactagcaaatatgcttttaaaggcaataatctccttgtagctcttcatcttgaggggagctattggtgagatagacattagccatgggaccttgtgagtcccagctgcagccatcccaccaggcatgtagtacctaggtagaccagaagaatgcacaaatgagaaaggaaaagtgggggaaagagaaaaataggagtataagcactagggggaggaagggaaggaaagagtggggaaggggactagagatctctcaatcgttgatttagtggactataatgcagtgcacaaccagaaacattccctaagtatcttctccctggaacaatgctggcttactgggagataacacatcgagcatcaaagtatgccagtgagatcagaaaccagcgccatgctctctccagtgtttttatattctaggacaaattcagatactctcctgaactctctcaattcagaattactcaagtgatattctaagaacaaaatactagctaataaggagtatgaatggcccacatcagatagtctggcagttaatagatactgtcccatgggagaagggggaagcaccataaaacagcaagtaccttcataactttcatcacaaaactagacaatccatagtcaagagtggacagaaaaaatactttctcaaaataaaaggtatccactgcaaatactcatcattacattttaaagccagcatcgaaacagcccttagaaactaccttgccccatcccttcattttgcccatgaactcagaaaagcaaatgacttgcctttcccaaggctttaataccccacgagttacaacccagaactgcagccccatattttccaaactctactgtttcattcttccctctacactcctccatcctctgcctcagcttctgtgtgttctgggcttctttagggaggcatttttttttttaattcttaaaacagtgtagaatatttgagcatcaattggataatacatgtcattgcagaaaggctactcatggtcttcagtgtgatgtggcattttgtttatgcagaggaaggttcttcactgaggaatatttgaaggtatcatgccatgaagtcttcagcttacttccataccacaccgcaaaacaagacagatggatgacagacgggcaggtaagcatatgggaagatgttataactattgaatgtgaggggggagatgctcatagctattgttccacatttttatgtttagaatgctgatgatgaaaatgagagactatgagatgtatttttaaatcctatgtggaacaggtctataccaagcaccatagatatcccatgtgaaccattcaagtcaaatgtcccaaggagagggcctaggggttgccagataattctaaacctaatggcaacaagccacttcttacaaatatgtcgatgggtgacagaaactagaagttcttggtacagactagggaaccttggaccctgctgtcattttatgttactctttccattaacagaacagggaaaaaggaaaacctgttatataaaatctgaacaaactacaaaaacagactacagacaattgctttaaagaagaagaaaaaaagccagccggccactgcctttgttttccctgcactttaaaactacgtctctgaaacgtctgatctagtgtcatctcccttaggaagcatcatcaatggaaatgggaatccctcacctgggaagaaagaggtgaccagctggctcttctccgctgttaactggccttgctctttctcccattttgggcctgatttaaataaagcctatactcctttagctttgacataaaccaggaatgtacctggtacatatctccagattcttagccctagatcataaacacgctgattacagatgagaaatgccacgtgttcctttatttcctcttagctatttaaaaagctcaattctcagaatgcagttggtctttctggaggcaagcctcacagggcccgatcctaagccctgcttgctacctgccaacaagcacaacccctgggagggctgtggctagggagtggctggctgtgctcaacagatcaggggaagaacagacataatacaagcaagacgtggctcctgctttcaagcagcttattgtacataggaggtttgacatgtcattgaccatgacgtggggttcaatgaaatgagacagagactgggtaagttagcgaaaaggactgacaacccttctagatatggcatagtgacagaagcccatgggtgtctatgtcctgatgctttcatgtatgcagacacgtgtgctccaaaagaggagcatagcttgccaacaggcatgtgggaaaggcagcacccataatggatggtgtacagtatgtgtgtacaggctaggtgtaagcctctactggggaaaacatgttaaagtgaaggaagtggctgacgcaatacaatcaattcccttggccatttcttcccatcagatttatacaaaacccaaaaacatccattaagacacaatagcatgtgtacgttattcccataatcactttgtgttatgaagctgcacaaaagagccttccattcccttcctctggaggcttggtcatggcttaagagtccacattttcaatccattcaaccaaacttgtaaatggaaaatgttcccaaagacatccttgtttgtgtgtgcactctggagctaaattagaagactgttatcatctcaactaagtgagccacacccctggatgccacaacaattccctagagagcactaaagtgttatatgatgccagagctcaattctagaaatttcctgtaatgattctgttttctgggttgatataactgaagtagagctattctgtttttacagtttagttttaaaatcctctgaatgagctacagtataattataaggaaatcatgtatgtcaaaacagaagtaagatattttggtaaaatcagttaatagtttgatttttttttccttgaagagtttcagaaagtttgttttcattccctgaaaataggagcttgctatagagctctgatggcctgaaatttattctgagcaatgctgaacaaggagaggatgggacatggttaaatttatttcagctgcccttccaggaagagcaaaactaattgttatctggaataaacaaatccttttttagagacggggggggggaaacaaagaatgagaaatatttgaaaagagcatgaagagtaagaaactattagatggtatgcatgtggttataatagttaaaaatagttaaaaatctgtgtttatcaagcgatgatgacatatgaaatgtgtacacacacagtggagcatcactctgccttaaaagggaaggggtttctggtcgatggactttgaaaatacaaggcccagtgaaacaatccagacaccaagggcaaatattatttaatcccacttatctaagacacatagctaaaacaagcaggatcatagaaacagaataaggctgcaaggtagtgggggatgtgacgatgggagcagagggaatgaagggtgacttttcataaaatttattgagctttctctctagatggagaaatggatagtggtacaggagtacaacattatacatgtgcttaatgcaaatgaatgcacactgggaaatggttacgatgggaaatttcactatatgtttattttgccacaagaaaaacttggatttaataaccaaattaatttaactaaaaaaagtattcagcacaaaacgcaagaagtttgaatgtaattattatttctttaggtgcttattactggattaataaacatcaactccactttttatttccccagttatacagtttataccaagaagctattgagagcctctctttctcaggcaacacctcttccttctccttctcatcttaggcaaagtgtaaaccacctggtgtattctgaccggaggttcaaacatctccaatccatggtcaacttacagccccatgaaattagatgcatatatttagagtgattgatttcctctagtagtctgtgaatctggagaagtttatggacaagatgcttgtgcttatgggatttcatttaaaaacctaacagttgcaaaacacacacacaaaaaaccccacattttaacaatatggattcagaaaacataggcaccacttcaatacaacttagcaatggctattgacataggtaacatgaatgtctttatttatttatttatttcctttatgtgaataaagacattatcagtggactaaagtcctatttccaggttgatgggatcagaaactgcataaagcaagtttcacattttctagactttctctttccaactatgaatgtctttgtgtcaagatttggatgcaccctaagctcctcttccactaaaattttatgagcaggtaagggctgaagcaatctgttacagtttgcgagatgccttccacaggttcatacgttgaatacatggtccccagctggtggcgctgtctggggaggtcaaagaaactttaggaggcagggcctagatggagaaagtgaagtcaccgggattgtatctctacttggttcccagtcccttcctttcagctttctgtgtaaagatagactacttcctctaacacatacttctgtcaccatgatatctgctcaagctcaaggggccaagagaccttggactaagccctctaaaaccaggagccaatatgaatgtttccttcccttaaattgcttctgtcaaatatcttgtcacagaaatgtaaaagaaactaatgcacaattcatcatttaaataaggcgggaagtagtcttgctcacgtgtgagcaagtgctctaggaagcctaggcaaggaggagaaaagcctgcctagtcttagcaaagatcaggttcgggtccattcaccacgcccagcttgttgactttttattagcagacactgctggttttatggagatggcagtcatttagctttgagatagtgttgtgacataccactttaagagaaagttaaatccaaactacatacaagggtaaggctaacatacggttaaactatggggctttgtaagttcccagacaaatcttatggaaaagataagaaagtccaaagaattgtctactataaccatgcttttggttttgaatggatgcaagtagcagacagagaaaaacagcaatatacggtaaatcatcagattgatgtttcaacaccataaatccccctccacacatttaatttcctccaacttgcaaaaactttaagcaaatattttaatcttccaggcctggtaaaacttttgtttatgcaaaggaaaggccccagtgaatggattctgagaacacactgccctgagcagccagcccctctctcctttcctttgttctgagtcttgtaagattagcgatcttgaaagactgtgaggtcagaccccagccaatgggtaaaagacacagtcaccacctgtgtaagaataaaaaccaagtgaactttctgctttgttgtacatgctatcctcagtttggggtgcatttttttccccttccaaaaagacattggcttactgagctttaatagatgaacaatagatagatagatagatagatagatagatagatagatagatagatagatagacagatgatagatttggaatcaaacagttaaattaaatgacaaacggggactaaccttaagggtggtatgtgacgcgtgcacagggacaggaataaaaaaaaaaatcacatatggggtacagtgaaggcacagaggagagccaccaagttagagtagaatttattctaggaagtagaaagcagtatggaaaggtaggctactgttatttgggctggcgaagaaggcttgaaaagtgtactcatccttcccaaagtcccatgtgctggaatgttgggacacactcgtgagctattacattctgtctccaaattacaacaacaaaacccagtacttgtttcatgcttgactaaatctacatgtccaacctttttaaacattgcaacttaagattttgaaaacgtaagatcaagcaactttatgcttataatgtattcttccaaatggaaatttcaattgtttcccccactgcagtattttcagtgaaacgtttcaatgaaatggaccctgttctcagcagactcattttaagtggtctttgtctggattaattaacttcagatctctgggcctcctgctgatcttaactagagtagctctgcccctggcagagtcagatctcagtattcaatcttccaacttttaagaacaaaaaatatgggtaccattatcgaatatccaatgtccaaatgaagccaatccaacatttggattcttcccacagtggcagaggatcaaggcatcacaccagcattcacaaatacacagtaaatgtaaacccgagagctaaaagcaacggaggtgagtcatttgctagggaacactatccactcacaatggatttcagtgcaaactcattgtcctcatgctatatgttatcattaggagggaagtgctggatccatttccttacaatggtaagtctgtttccatggtaaccagaaagtgtgcctttcactccgataaatgaacagaacacccactaagtcatgcattttctggtggttttaggaccaatagcagctctaaatcctgacaaacacccatttgtttcctttcttatttttatttttcttacatacaaaaaaaagagactgatgacagaagtgtaagcgacctgcaacttgactaacactaaccctggatacagtacaaaacattccccattctggacaggcttgtcttgtcaaatgaaatgaagctggcctcacttgcgctgacaacaacactgtaattgctacacacacaagcaggacaaggcaacaggagaaagtagtggagctttcaatatgagatttttttcatagttcccctagggttctaatcaaattccagtcagtgggctggtggcacacacctttgatcccagcactggggaggcagaggcagatagatctctgtgagttcgaggcagcctgggtctacagagctagttccaggacagttagggctattgcacagagaaaccttgtcttagaaaacaaattccagtcaggaatctaagtgaacaacgtttgaggtctatactttgtctttagcctgtggaatgcaactccaggatcttgcatgcttgcactttgtcaagagtttgtccagaccagctgtaaagagcagcatgacttgcagaccatggccatccatgtcatgatgttggatggctctggattagtcaacaccttcacacaaagctttcagtcccaaaagttctaatgatctatcttcgctgtaaactataggcctgcccaggttccacaacaaaagctcttaccaaggtgccccttacttccactaggctctcatccagttacctctgtaaggcccatccagagttaatagaagacatatcctaactctgtactttcttcacagtcgcacctctccaccctagccacagtgcagaatcacccgaagagcttggcattgaactcttggatatttcctcttactaggtcagcgtggagcccagcgagaacatttgaagatgttcctctaaatgactttggtgcacagctccaccaatacccggggtccaatagacctgtgcactaaccaatccaaaacctttattatacaagttacacggaaacacattcctttatttctctgctggccgccacccacaaaagtcctccaaactctttctaatcctttatgcacatgcatcctcacaaacgtatcagtgagtatacacaatgtgaaaatcctatattgatttcactttccaaaacaacctccaacactccatattgttctgctgttttcacttaacaatatccacttggtccttctctgcctcatttccagttgttgccgagtactagcctatcccagttgtacttaaatcccacccctctaagtctccactgtcctctatggtagcagaaagtcacatctaactttgactgggattgatatagaatgttctttagtcacaagccagacctcagattcaggtttaaatgtactagactggagggggtgcatgtgtgcgtgcctgtgtgtgtatgcgtatttgtgtgtagaggtcaaaggtcagccttaggtggtgttccacagaagccattcaccttggttttgcttttttggtgtgtgtttttccggataggctctcattgggcctggggtttgctgtgcaccccacagatctgcttgtgtctgccttcccagtgctgggattatgctcacgggtcgccatgctcagactttcacatgggcgctagggattgaactcaggtctgagtgtttgcatagcaagcactttaccaagtgaacaatctccccatgccccactccagatttttaaattcttaattctgaaaaatatgtaaaaatatctcatttggtaacttttattgattacctaccaaagtgattatgttagacagttgggtcaaataaagcacaatattaaaaatagccaatttcatctgcttgtttactttcataactgcaataattacaaaacataaggtttattgtatggttctgtttatgtttctatgaaatggctctgttctatatgatggccactatagttcatctgatatttaaaaaaaaaaaaccacaaaataccatagtggacattattctagattgcgtgagcattgatggaggctatttgcctccagtacaaagtacagaagcattttaaggtggggccttaactgtcatctactgcacagagtggccaggatgctgcatttcacaggacagcatctgaagacaacaaattaattggctcagcatatcaacagcacaaggttcaaaacccagttcagcaagaagcattcacggcaatgttctccaaagacagagtttaagtaatgggatcattgagctctggaaactttcacacacagactaaaatacaataaattgggtgggggtgggggtgcataccttaagtactcaggaggcagaggcagatctctgtgacttttgggccagtctggtctacagagaccaggacagccagggctacacagagaaactctgtctttaaaaaactaactaactaaatgaataaataataaaatttagcctgaaaaatctgaaaggtcttagatagcacccaatacacattctaagttcacactactaccagaagcaacaaaacagctcaaaatcctagagttctaagtaatacttagaggtttaaagtgccccctacacttaagaaaaatgcctatgattccagaatacagtgtacattaattcataaccattagtaaaattctgctttccatgcctggccaaaccatgaatcctgggagttgttcttcaatcatctcaaatgttttttgagactcaaaagtttttttttctaaaagatttgttttcttctaaaatctaagggcccaaagttgctagccaacatgattcccagaataacttttatgtacaaaaactgatagttctaaaccatgtgacagtcccatgtgttcactctcaaccactatttcttagttactaaaaagctttctccaagtagaaagggtaatgtacacccataatcccagctctcaggaggctgaagtaattccagtccaggctagactacacagcaagatcctgtcccaaagataaacaaacatgcatatacatatttatcgaaattaaatctgttatgcaaatccagaggtaggatttatatgaaattcaacatcatgcccaagtatttgcattttatgtagtggcatcttgctttgccagtgaacctgcggtgatggccatatcctatggatgtggcttcgggtgttcagacatggccccttataagaaagaggagagactggctcttgctcttaggttatggtgagagcatggaaagggtagagaagcatcttcaggagcaggaagactgtggcagttatttactgttaggcctcaaaaggcccggacgcaaggcctagtgggaacttcctgagcctggctagagtttggcgacctgtctttggcttatcacttccaaataggagtgactcagcaaaactgcctctgcccagctactgctaacatggtgaaatattattggcccttacacctcaccccattctgaggtccccactcattatatatacctgcctgatgcaagaaagagagatcctgcttcgataggtctcctgactcagtgtggttctctctggtgactaggacggggtctgggttgttgacattcaccatcccgctcagccccaggaagagaccagttggaccggcccttccccagtcctacctgccagaggatccagcaatttactactatttgtgtaagtgctttcctaataaatacctgtttatcatttaccttgggtcttgtggattcatttaaactccaccttcagtagcccttttaggaaacaagattattttcctatttttgattcagtttccatatttataataattcagatttcactatcacggttcacattctgaagtttctttcatggcatgttagtaaggtcccttccaggcaaaagttctgtaggtaaattgtgactctccccagcttctcctgctatgaatttgtaatgaaaaacaagttttaactttcttagtggggtagatttgaatcctgaattcactcaatatgaatagagcgtgtaaaataagatgggaatacaaacaattagctctatctagacagaaaccaaaatgctgtcccactccctttccccatattttgtgaggcagtttccaaagttaaagtattccagcatggctagcaaaactggtgatgacttctctatgtcttgacctaaactgtactttctactttcatattttgagcctaaaaattttagataatcaaagggggtcaggaaagaataaagaaacagaggaccagtcttaatagtcctgtgtttgatcaacaaaacactcccacatggaaggctggcaggggcactgcagaagagggggattggcagggccagaggaccatggagtttgcttgagatggatctcctggtaatgtgagaaactctacttgtaaagactgaccaacatgaccacccaaacgtgagctgagtaaggaggacagcaatgaacacgccaaactgaatggggaaaagccctcaaccctatacaaagaacaacagacaacagagtaaagccaggagcagggctagaggacctccccacggaagaacacaccattggttctccagtgccaaacagtcagccttgaaaacatacatacaagtaacactatatagactcatcagactatgtttaggaatatatatgtttcaacaaatatatatacaataacagttgatggtgaagaagccatgtgtttgaaggaaagtgggtagtatatgggaaggttaagaaggaagaaaggtaaaggagaaattttgtaattaaaatacaatcttaaaaataaataaaacccaaacaactactacaaagaaacagaggcaaggaaggaaatgcaagccaggccatctttgtttatttgctggcctaaagggctcttggcacacaaacatactttaaatacttgcttagaaaacacacgatggagagaaaagaagtcacccagtttttaagtaaagcattgaaggttgaccaaaagtttcattcagaaacagaaatgagaacctgacacttgtgtggcactggacaggcccacaggtgtatgggcagcgcccctctcactagccaaccaagacctcctgaaaagcacaggtagggggctggtgacatctcttggggcaatcaggtgctctcccctgttctggaatagaactcagaactgaaggacagactgcaaagaaacagagcctttgcaaaacccttcagctggcctagtgaaggatgctggggtaccagttagatattgcctgtgcctcagacagggatatatatatatatatatatatatattatatatatatatatatatatatattttttggtttttcgagacagggtttctctgtgtagctttggagcctatcctggcactctcttggagaccaggctggcctcgaactcacagagatccgcctgcctctgcctcccgagtgctgggattaaaggcgtgcgccaccaacgcccggcagtcatatattcttttacattataattcataatggtagcaaattacaggtatgaagcagcaacaaaataattttagggttgggggtcactacaacatgaggaactgtattaaagggtcgcagcgttaggaaggttgaggaccactgccctggggcatctaataggacacacattgggctcatgttagttttacccactcaataacggcacctgaggtagccatggaagacctttggtttatttcttccaaacgcctaaaagttctggaccaaatgtgataacataaaaacaaattagcccaactcaaagcaggaaaaaggattcacagcttccacagacagaaggacttacgtgtcagagcagcaggccaagaagctgctagctcaggagccatggatgggagctttaactagggtgaggcagtgtagctgaccctgtgagctgctgtcccagcttgctctccattgctgtcataaaacattcttaccaaaaccaatgggtaggaaaaaagggcttatttggcttccaggttaaagtccatcatccaatctgggcaggaactcaaagcaggaagttagagataggaactgaagcagaagccatgggaaatgcttcttactggcttgctcatggctttcttagtttcctacacacacacacacacacacacacacacacacacacacacacacacacacacacacacacacacacacacgaaatcgggaccacctgctgggactgagactgctcacagtgggctggaccctctcacatcaatcactaatcaagaaaatgactctcacagacttgcctacaggcaatctgatggaggtatgttctcagttccagcctgggcttcattagcaatgagggaaattccaggctggcatgttataaggaattgatgaagggcagagtgacaacattcatgttctcagaaaataaaagatgaagggacagaaacaatgcacttagcctgcagagaagagtcataaaatccactgaccaaagatcaggctgagaagtaattcctggaaaatttcctggtccaccccaatctttttctgtcctgatcagttagtctgccttccaatatttctcttgcctctactcccccaggaagtaaaatgtatatatcaagatttttcagaaagtaattgagtctatcaaaaaataaatagttttaaaggccaacaattaacccaaagggtgtttcatgtcctaaaaatctgcataaacatgctgtctgttacttgggggattctgcatattttaaaacaaggtcaggtcagatccaactagaatgtgagcattttggagtcatgattgctttagcagtaaatttctaaatattgcactgtgactacatggagataatgctgcaggtagacaagcaaaatctatggaaccagataattcagaattacaagaataaaccagcataaaccaactcactattgctacttgataattatattgtatcatcaaaccatgtcagctactattagatcatagattatagctatcagaagttcaaggtcatcctcagctacagacttttggggccatcctgggctacatgaaactgaggaaaggggagggataaaagagtggagaagattgtgagtccctcctcaatcaagctgttaatgcttttaagcaaatcagctaagctgttgcttctgtataaaggaggtggggttgaaggagagaggaaccctgggatcaaagttccaggcttctgcttcccctggaacgtaatctatgctcaaagaatcgaatataaatagggtagcaggatttctggagctccatgatggagtgataatggcaagatggaaaacaagggatgacccttgtgtgaaaacctataagcagaaaccaggatggcagacatcagattaagagccattagcaactgaaacactgggacttttgtatcacactacacttgggattttaaaacctctatctccttcattgtggttactaaaccaaagttgggcaatataactaactccatcacagataaaagaacatgcaaagagcttggcagaccaggggactatagaaacattacaatggctgccactgaaggcaaataggtaagtctataatgccagcccaggctctgcacagcaatccagcttcacctgaaaggtatttaaggcaggaatagaaaggccatgtcccatttaaagacatccttatggtattgtcaagtgaaatgaattttttttcaagttgctttgggtccattattattagaaaggaaaacatttctatgagttggaatttatatacataggtgtatatacaaggtctcattttcttctctcactttgagtgggaataaagtaattctcatctttaagagtctctctgtttgcagctaacaaaagccttcgcacaggataagctctgaggtctcaatcacatgccataataaagtgttttcttattgttccatccttttgctaaggtcgattggcatcgagacagatctcaaccacagagtaacatcttcatcttatgctactaatgggttctccgtgagaatcttaatttgatgaatttgtctagcttttctgaaaacataggttcatgtggcatttcaaccccagaaagtgatccttctcagctccccccacacagcattatcacaaccaaggcagtcactatacagtcggtaatttatcttctccctgatctgaaacctatctcaccctctcaggtctttatggaactacatccaacaaacagctttgtaacaacacttggatgaatactataaccctcccttgatttgtggctgtccttagaaacaaagtcaatgtttgccagtgtaaacgttatgaggaaaatatgagctcaatctgccaaccaaaaaacatcaaacatgtgaaccccaccttagcagcaaactgctcagaaacaagtttcttccttgttcagttccagcacatgtgatggggcaatgctatgctcatgcacagaaagctaacaaatcccatgggaacagcacagcattggcagttgggatcctgatccttggcaaggaatcataaagtaaggatctcaaactaggactggtgatataacccactgcagaatgcttgcctagcgtgtacaggtgaggccctaaactcaacctctagtaggaggaggggagaaaagtgctttagactagacaccagggcactgtggatatgcatagtcatagactgcctaaataggtaaggtggatgtgggggtagtcatgcaacaccgaaattactgaagaacatatacacttagccaagctatgtgagtttggacacccgaattggctgatttggggataggagattaagtatctgctccatagtttctttaacacccgtacttcagggaaagaattttgataagtcacttttactccccactgaaagagttttgcttttgattagtataaagaaacaggggcacttacaggcattaaatgagtgtaaggattcaggcattatgctggcctgcccctgtcacctttatcataacactttgtcgtaacaatgagagtttcatgtactcaatcaaggtgttccaaaagcacaccaacctggccattctctcaaaagtattagccacccttcccctaggactgtcatcagtggacaaagcttctagctcccaaaataccaatcaccaaccaagttatggtattttttaacatggattccttaaacacccgatgttccctacatacagatgaacaccccagaaccttcctacttactattcatgttcagagcatagtctataaatctagaggggtgctctgaaattgtgcctcctctgcagtcctggggtcagggctgtcttgatgctcaggctgtggcagactccagcacaacaaacgctctgtctgaagtacaacacaatcctgcactaacttgttttccctgccacatgatctcaaaatgtacatccttccgacagccgtgcatggaagtcaacacagaaagcataagcttcagtgtgctcagtcacacatccaaatcacccccctcccccatgccctcacttcctacccccacacccagggttcagggaccactggggaaaagggagaagatcataaggcctggatgtgtcttctaaacacagtaccacagcactaaacacagcattcacagtaccacagcactcacagtaccacagcactaaacacaacagtaccacagcactcacagtaccacagcactaaacacaacagtaccacagcactcacagtaccacagcactaaacacaacagtaccacagcactcacagtaccacagcactaaacacaacagtaccacagcactcacagtaccacagcactaaacacaacagtaccacagcactcacagtaccacagcactaaacacaacagtaccacagcactcacagtaccacagcactaaacacaacagtaccacagcactcacagtaccacagcactcctaaacacaacagtatcacagcactcctaaacacagtagtaccacagcattcctaaacacaacaacagtaccacagcactcctaaaaccacagcagctcggattgcctgccccaaaccaggcgggacagccttctagcacagaggactaatgatcactcccctccagagactgaagggggagtcagttttccttaagggtgtggcctgtggtaggccaaccatgattcagtggatggccccacacccacgagtatatataaagccagagagtagggcacacacctttaatcccagcactcgggaggcagaggcaggtggatctctgtgagttctaggccagcctggtctacacatcgagttccaggacagccgccaaagctagagaagctctgccttgaaaaacaaagcaaaacaaaaaagtgtatatggccagcaccaattggactcaatggatttttttttttttttaaagacatagatttggaaaatgggccaggcgttggtggcgtgcacctttaatcccagcactcgggaggcagaggcaggcggatctatgtgagtttgagaccagcctggtctacaagagctagttccaggataggctccaaagccacagagaaaccctgactcgaaaaacaaataaataaataaagtaaataaataaataaaataaaataaagtaaaaaaataagatttggaaaatggatgggaaggagttgtggattggaagaagttaggggaaggagcagggataaatatgatgaaaatacattgtgttaaattctcagggaatcaataaagatacatattaaaaagaaatcatgaagtgttccttcctcaccattgagtatatattctgtagtgtgagtttgtcagaagctacaaacaataggcagagggtgatgggaagaacaaagcacagttgtggccatcagattgagactccctagcttttatctgaaacctactgggcctgctttgctccactgactcctgttttatctgcaaacctatgctttgtctagggcggttgttctcaaactccctaatgctcatgttgtggtgaccccatccataaaattagttttgttgctacttaataactgtacctttgctactgttatgaattgaaatgcaaatgcgtgtgttttccgatggtctcaggtgactcctgtgaaagcaccatttgacctcccagggagtggaggcccacgggttgagaaccactgctctaggcttagctcttgatctacatcatgcttccagcacaactcaactgctgcaactgactcgatgatgagcaaaatcagtgtgaatgttagaaaaacaaaacatagtcaccatgccaaaatctgaagatgcagacaggcacagctgccttaaaatgcataacattttcaagactctagtaagagtaaagacaatattcccatgccgctctacccagaccctcagtttaaacagagactactgtcctaacacctctcacgtcagtctaaagcttcctgttgtgtagtgtagaagtgagacccaaacacttttgtttttaagattctaatacaatagcatcatttcctcattcctctcctccctccacaccttctcacataccactccttgccctctttcaaattcatgccctcttttttcattgttactacattatatatgtggatatacatatattcctaaaaataacctgctcagcctgtataatgttatgtgtatgtatgtttgctgggttgaccattgggtactgaataagccattggcagtctcttccttggtaaagccttcctctggctctcagcactccatagtcgcctgtagttcttgtgtgggatgaaggcctttcggtctttcctcacccacttttgcttgtctgctgttgatgtccttgctcagctcatgtttaggcatgggggtgaggactatactacatagtccaacattttcatctgcacagatttcatccttatgaaagaacaggctgaaaacgcaaagaagattcattgccatgtgtcctagtttgcaccatgaccaagagtaacttaaggaagaaaggatttatttggcttctgtggcctagggtcacaatccatcaccaagagaagttagccaaggaactccaggcaggaactgaagcagaggctttgaagtaacgctacttatcagattgctccttatggctcacccagcctgcttccttacacaaacctggagcatgtgcccagggtggtaccacatactgtgagctggtcctccaacaacaatcaagaaaatgtcccccagacttgcctacaggccaatctgatgaaggcattttctcaatcaggttccctcttttcagaaaaccctaacttttgaccaaaaccaaccaccacactggggcagagtgtgagggacagatactgtgagtccacctaaaagactgcagtgaagctagagctctatagtcttgattgataataaatcctttgaaactgaattgtaccctaaacagacctatgggcctaaaggatgctgtgtcccttacctcactctatactgtgacagtggctgtcatgcctggagtaatctcggggacaaatctcttgctccatcctctgggccattcagtcccagcaagtcgggactgaggtccataagaggggaggatctctactcaggatctccgagacaacagcctttcctttaaagccactcctttaaagtgcaatacctgataatggcacttgagggctgaccattaggtagactactgaacaggagtcttcactctaaggccgggtatggctgaagcaagcacaaagcaaggagaaggtggtcaccctgagccaagaatactctagctgatactaacaactcacacagtgccatgaaccccacttactctcccagagaatacactcctgggtctagaagctctagaaattggagagaggcaccccaagtcctgcctcctctccacaacaaagatgtccaagcaaatagcaatggcttatctaagccagaacttggctgctcagtgacctcaagaggcacattctttcaatttctcaaaatcatctcctccactttcataaagggatgttagttttgtaaactgtaaaggaaatcttgatgcctgcaagtcctctgctcctggggctttcaagggctgatttctctgccctttagggttgctgttcctggcttatgaatagaccccaagttctctcccggtcggaagcatttcagtaacagtctgtcacacagaaacaagctggacttgctgattgctttgggtctactgactcatttctgtacgcccacagcaagaagtaactttttccattgtgaagtggcctgtttgccctgtccagctctgccattcctggatgctgttcccctttgcaaggtgattccatatactgttgtgacacacttgaatccagttattcatgcattcaaaattgattaagaaactgtttaatgaagcaggcctttggggaagtttgccttcatttgacaatattaggtaagttaaaaatactatgacttgggggctagagagatggttcagcagttaagagcactgactgctcttccagaggtcccaagttcaattcccagcaaccacatggtggctcacaaccatctgtaaggacatctggtacccttctcctggcctgcaggcatatactgtatacataataaataaatctttttaaaaagttcagaaatattatgacttaacttcctgctcccttcatttatcacttaatataaagtgaccatgtagctcacatgtccctctgtcgtggtttgctgtgacactcctaagttgacacctgtggtgctgggcagctgttaacatgcccacccacaatagtgctagtgccctctgagggtcattagctccccctgcatatttcacagagtctgtagcatttcgtgagggaaaagcttacaggaaagaaaggtccgtcatttccaggggggcacatgaaacccttgtcctaaggtcagttgtgacagcctgcaggaagaactggtaaagtatggtatgtcctttcaagaactgctcctttcagggacaacctgacagagggatgaagggcccaggtacacagccagactttatactgctctcttgactatgtacacatcaacaaggtagttagctattgtgtgcttcacttttcccatatggacaatggatataataacagttcctactttacgaggttgtggacagtacaacatgagtccctgcctggcacattcaaaatgctatgaggtattttccactacaaatgcttggatgtaagtcctattaccagacagctacatacaggacagaccaaggaaggaccactttcaaggtaaaaaagaggtgaaaccctttggttctggggttggcagaagctatcctgtctctaaagaaataaataattaatgaacaaagtaggtcactaaagctgaatctcaagtgactggctcaggtctcatggtttgacccagtggtacaatccttagggtccagagtgcctgaacacccagagaaacagctttgtggcccacattcctgtgaactcttgtcttaagccagtcaatttcaactaatggtggctcttctattccatatttaataaatacaaaggacaagtttattcacaaaaatgtgcataacagacatgagaccccagaccttgaaggacactggaaacttccactttctgaaatcttattctgtgacaatgtactctctaaccgtaacttcagatcaacccaacctcccggcattcatgaataccttgggtttctcaaagcctcctctgcccccaccctgcattgttcaacacaagattcctccctggcacactatccagatcatgtgtccttccattttacatcctctcagcaacactcactttttgtattcactgttcaggtgctttgataaaacaccaaggaaccttatagaaggaaaagtttatttggggcttacagttcaaaagggataggagtccttcaccatcctgttagggagcatggcagaaggcaggcatggcactgggtagcaacacagagctcacatcccagtccacaaacaggaagcaaagagacagccctggcagtggcataagtttgaaagtttaagcccaccccaatgacatatctccctccaacacttcatgctcctgatccttcccaaacaaccacaaactgggaaccaagttttcaaatgcctgagacttaaagggaaacatctcatttggaccaccatgctttcccttcctaatgtttgctcatggtacccaaagcttccaatccaggactgagcctacttgacacaaaataagccaccaaacaatcgcaggaaatgtttgattggttctatcactcagttacagtgtagaattgcagcagttgcaacttcagcttctgtttcaaatctacttgcctcccaccctcaacaattgtataacctttctctcccttcaactagtttctctcacagacacaattatcccactttgcccaccagaataaaatctaatctgggactgtccatctcaagttctggagatcttgtctatcaccttgaacttgacgtttgccatcatctaacaatggtttactactccatcttttgtagtattctctctggcacactagacatggaatttttccatcacagctctttatttgtttgtcccaattaccacaatatttgaatccattactccacgtttatcactggatacctccctcatacttctactgttgcacagtgtctccagattgcctaatatttctgtatctctggagccatcacagggcatcaaggaaggtaaattcagaggccttgtcttgctcatctttgtattctcaggttctgagcaatcttcaggatatactcaaaagccactggcatagaactggaaaggatggctcagtgattaagaacacttgccgctcttgcaggtgatctgggtttctttccagcatctacatggtagttcacaactgtgcgtaactccagttctgggaggtcgacatcctcttctgacttctttgggcaccaggcaacatgtgatgcacatacatacattcaggcaagcactcacacatataaaaaattaattaacttattaaaaagccatttgctgtgttgatggaaattccactaactaccagacctgggttttcacacttctgtcaaccacattaaattagaatactcaggggcccccactcccctatactagcacctgaaacttgtttcctccaattacacatgaatggatgctcagagattgccaggcagcactcaggaatctgagaaatgcttttagagcctcaccccatctctaattggcttacttccccaaacacgtggagagacagcaccttctttgtcttgtgattttgctcagaaaacagaggcaaggcctaaccatctaggtgaggttagcacagaaaggaagcagtcaaggaaggaaaggaagctcaggttacagccaaggccaacaggaaacacaatctgctagtgcagggaccctagactcctctcttccagatgccaaagtaagtgactctaagttaataaagttcctgtaaacttccattttttattttcatcatctttattttatagctagtggaaagggtggagattgaaaacaaaaaggcatttcgggtgtgaccacagttgccttctgtgtggacagatgttgaacagcctaaccactctgtctgtgtccacagggttctgaggagaccctcatgacctcctctccaaaattcctagtggttctaaaaagtcagcctgccttccagtccctagaggctcttgctgaaatgtaggctctgccatagtaggtctgcatctcccaccagatccaaggtagagcctctgggctgtgcctaaacctgcatgtcaaggttctgtccctccttcagtggccatgtttatgttgctgtgataaacaccgagatagctaacataaaaacaggaaggatttattttgcttacaactgtctacatttctataaaggataatccttcctgtcttgggaatgtggaagtagaaaatacgtagcaaaccgcaggtaggaaactgctcacacctgaaggtagctcggttggggtggggtttggaagagatcccttcaccaaatctctgaggacacatgcaacatgaactgttcccactaaaacctcccattgggccccaccacctctcaagagcaacaatccagaagctcatgcctttgggggcattttagatccctcttatagctatgtgtcacccggggacagagggctgcctcactgagcctttaaagtattacagggctggagacatggttcagcagttaagactgctcttccagagaacttgggttcacttcccagaacccacatggtagctctcaattgtctgttccaggggacctgaaacccatggcaaaacactaatgcacataaaattaaaatttaaaacagaagtattacaattccacttccaattctgttttctgtaagaatgtgaaatgagaaacacagataccactcctgatccatctttcagatcatctcctttgagcgatgtgtatatgatcctgaggcattcaggaaatgaagttctgccacccagaggagcagaccatttgttttcagttagctactgcagcatgctggaatgctgatgttgcaggatttatggagtgcattatccagtttctaagctaaccctcacacaatggacctgcatcagtcacttttcctgtggaaaatccatgacccaacctacctaagaaaggtggttttattgtagcttacagttcaatggtacaagtccacatcagggaagttccgaatgcaaggcatggcatccagtcaggaaacagatgacagccggtgcccacctcactttctccttttcattcagtccaggcccagcctatggattggtgctgccctcagtgaaggtaggttttcctactttaagctaatctagataatccctcacaggtatgtgtgtcttgtaggtgattctagatcctgctaagttgaggggatttgcacaagagtacaaatattgtactagggtacaatcacagtacaagaggccaagacagtgacaagaaactgttgactaaagatggcattaagggttgaagagagaggcccatggttaagggcattcactgctcttgtggaaaacaagagttcaactcccagcacccacttcaggcagctcataaccacctgtaacttcaactgcaggggatctgacatcctcttttggcctcagtgggtatccacacacatgaaaagcaacaacaataataataatagcgactaaccctaaaaaataccccacaatatcgagggaccaaaacccctgttaaaaacacttgttcttgcatataacttgggttccgttttcagtacccacataatagctcacagctgactggtactccagttccaggggagcccaatcccctcttctgaactccatgagcaccaggcacacacactcgtggtacacatatgtgcatgcaggcaaaacactcatacacataaaagtaaataaatctttaaaaaaaataaaaaacttacatctgccagccaaatttggtctacaaacccaaaattataatgttgtaaatggacttagagtcatctttaatgatgactttgatagcatattttatctgaaaatcacagtatacacatacatctttagagaaataattcctactttgggggtgaatatacaaacatcattttattaatgagaacataaagttcagggacaactgctttgtcctactagtggggctttggctgcactagagaacattctgaaaaattttgatcaatctcccacaggaaaaccttctttaatcctgtgaccccctttcctcaccatttatgccatgctgttactgacatggtagcagaagatccaacaacctgaaaatcaaatgcccaagagggccagaaagactcctgatgtcttagagggactaagaggcaccaaagcctaagagcccaagttagggctgcatgcaactagaagatgatagccccctaatacccctcttttgcataatggttattttaaattgagtgttttgaggaactgtaagcacagaagtcatgaaaacaaagcagaactccccatcttctcatgaaggaaatctactggtcagagagtctttaactctacatccaggaacacaaggatcactcaccatgtcagacactggtcactgtgactaaacacctgtgcagatcaacctgaaggatgagagttcattttccatttggtttcagtctaggctcagctggctccctttctttgggacagggtatccaggaatgtcagggcagagggtcccctggaattcaattgcacaccatgacagaaagcagagaggggaagcgtttggtgacaggatatacctttcaaagatgaaccacagtgacctacatcctccagagaggcctcatttcctaggatttccttaatggatgatcctattgatgaaatcagagccctcatgctcccatcacctctacaaacccaccagctgggatctgagagatgactcaacgggtaaacagagagacctgccaccctgtttgatttcccaagtttgatccctaggacccatatcatagaaggaaaaactgactcctataaattgttctctgacttcacaactataccttgtcatgtacacacacacacacacacagagagagagagagagagagagagagagagagacagagacagagacagagacagagacagagacagagacagacagacatatacggaaatgaaaaattagcatcagctggcaagcaagcccttaaccacgagcctctgaaagacatatttgtatctggatttaatgggtaacactgaccaatggagcaggtgcttacttaaagctgtgtgactaactttcccttgctggccatgatttttctataatttgacttcacagtcttctttctcactgcctgacaattgcaatttgctacaataacataactccagcctcctgatttctcacctctggacctggcttactttatctatgcacttcttaagatagagagcacaaaacagaattgcttgtccaacatgtggtgtgatcagtgcaggacagaatagggttgtcagcatttttctctcaaatggtatgcccattgatacggcctatgtctgtccattaaaaccatgtatccttttattggtacttgtcctctgtttcatcataattccagatttacctgaagactgttagacatggcattgttagatgcatgcattaccttctttgtgtgcctttagtgcattgccgttgtctatttgctgtaaagcatcttcttgctctaggtgcatctttgtgccttttgcatgcagtcatagcgaatactactgttcaaagtaattgcccttctttagacctagtaattagacaagattcatggaataccagtcactctaccacactcaaaacatagacatgggagtcaagcacagcatacaattaatgtctgctctccagtatcccaacatctgtgaatttcaataaatttcataatcctccaggatttgctttctattgtagcttaagttaccacaaactcagtggtctgaaacagcacaaaccaaaggcattgcattaactcaacaacagggggaaaaaaaccacaagaaaaataatctgagacatttcttcaaagaagaaatggccaaagtggccaaaaagtgttcaatgaggaggtagcatttcactgctcctagaaattgtcaagaccagaaaatcgattaccagcagtattcttgctactgcccaaccccccccaaagccaggcatttgtgtagagaaatttgacaatttgactctttgtatattgctggtgggaatgtagattatctatcatggaacgagtttaaggttttcgctaaaggtcatcatatagtccagcaatcttactcccaaattcataacccaaataattggaaacaagtactcaaactagtacctgtatgtttatgtcagtcccatatataataattaacatagaaataacaaaatgtatatcaatagatgaataaattatgtttggaatattttcagctacaaaaaggatgaggtaccagcctgtgctacaatatgaattaatctttagatgcacaaaaggccatatattatacgaatcctcttacactaagagtacaaatgtgtaaatacatggagtcagagcattgatagatgattaccctggaaagcaggaagccactgcacaaaccatggagcttctttctgaagcaatgaacatgtcttgaaccagctagagtgacgattgcacaacatgatgaagatgctaaatgccactgaactatgactttagagctcagaagttgggggatcaaagattgatagggatgtgttatttcttgagccctagggaaggcacccattccttgctttttccactctacaaccactggcattctttggctttggcttcttcctgtagtatttccaaagccatcctcatactcaaatctctacctttaatgtcagtttctgccactgcagctccttctccaacacagccatttcccaccccccacaccccatatatgggcccttgtgagaacttcagctctgcttctatcagacacattctcacattccatagcctcaatgtcccttttgccatgtagagtaacaaaggcccagtcctatgatttcagtgtgtccctaacagttcatgtgatagaaacttaacaccccaatacatatgttaatggaattttgaggtgtacagtttaggggaaataactaaggttagaccagtagaattcctttggctctctttagtcattccccactagagaaagaaaacatcttgcttgaagcttgcatgctcactgaccacaactttcagaagcatcctgagtgaaacagtgaccacgaaagcttcaagcaagatatggtgttttcttactctagaggagagtgactaagggaagtcaccagagttttacatatagcaaatgacttctccaggaacagggcagtcagcagaggaggagcatacagagtctctagggtttaagtgaataaaaagcagattaaaaagataaaaagatagaaagtcaactatagcctttggccaaaggacaaaggagcaaggatgagaccacacagagaaggaaatgcagaacgtgtaagaaagggcattcagatgacactgcaatggctgagcctcttccttttaaaggatctctctctctctctctctctctctctctctctctctctctctctcactgtgtatgcacgtgtgtgcgtgtgcgtgcgtgtgcatgtgtgcgagtgcgtgcatgcgtgcgtgcgtgtgtaagtatgtatgtacactgtcagaggacagcagaagttgatttttagttctttgtttctaccatgtgggtctttgtgattgaactcaggttatcagtcttgacatcagatttctttaccagctaaggcatcttattgatccatctcttgggtcccagtgagcctcttctgaatcaagtgatttccttcttctgtcaatcccaagaccatacagagattacctcaactccaagatgcctttttgatatgcttaggcaaactctagctctctgtatacacacgcacagacacagacacacacggacacagacacagacacagacacacacacacacacacacacacacacacagagagagagagagagagagagagagagagagagagagagagagcacgtcagcattgccctagacagatgcagccacagcataatgaaggaaaaaagggaatgggaacttataggatagcctcattaagaaaaattaagagtctggcatacacctgtacctgtagcaatccagaggctgaggcaagtggattttgagtctgagctaacctgggctaccagtgaaacatgtctcaaaaagcaaaaagcaaacaaaaaacaagaagaagaggaggaggaagaggagggaggggtgaggtgccagaacaacttagatgggtttgtttttagacactagcacctaaagactcggttctgtttttaaaatcaagcttgaaatgatagaactttcagtatattgtggatctatttgattcaccaacttttaggaccagtttaccaaaactgggcattgatttccactgtgcatttcttgcaagctcaaactggtctgctgagcaaatggatctcagtctcaggaagcagctgtgtaggccaggtcacctccttcctgggcctcttaaaagaaagatcattcattcaactgcctgccttaaagaaactgaaagcactaccaattaatgttactttgacccagaactcttatttatgcaaaacacagtaaagtattttatgagtgttcaggggttcctggaagagcaaagaacattctttgtttgatgcctgatccagagttgaggcatcagttgatatttcatcctcaaaaactgttgcctgagtcagccacctttattggtacatgtttgttgaaatgggagggggtgtttgttcgtccagggtggagaagcattgagggtagctagatattgcctttttcctctcctctcaggttataatctctcaccagtatacacagagtaaactgtacgtgacctgaagcaatgtggagggctggagttagctacacaagcacactgttccttggtcggctcatactggattttaattatgggcacccagagttattgccttcggtaccaagaagttccttttctaaaatgctgttctgcagcctgtcttgtgtaaccaggaaacactaaatgggagagaaagcaatgtctccactcctctcaaaggttggggaaagtggtacaaagccaattagaaacacagcacaacgtcccgccattccccagccattgctgtccaactgactaagaaatctgatatggctgcgttgtctagggagtatgggtatgattcacaaatgcaacagaactaaggttgaacactgtcccctgcattctgtgtgccatggacccaccctcacagcctacatttcccttgagagccctgatgtcacacattctttcctatcatcccacaaggtgactatcagtgccccagccatgagaagcagtctctggtccagaatgaggggcagataaagcctggcacagaatgaaggaagtaatcttaaatcttttttaattttcaaaaattaattgttatgggtatgggtgcaaatatgcccatgtaccacctgcatgtggtacttgtggaggccagaggtatcaggtctgctgagactggaattatgtacccaagtcctctggaaaagcagtactgctccagcccctcaacagttttatttatatatgtgcgtgactgtgcacatgcatgcggtgcctttggaggaaattgtcagaccctctagacatggagcctccagatggctgtgagctgttacatgggttctgggaaccaaattctgatccccttcaagagcaacaagcactcttggctgctgagccatttttcctgccccaggaggaagcacctccttgagggatcattgattaactcatgaggcaagcaaacagctctcagatggtacacatgttcatttatcaagatgatattattgtatatcaatacaaacctccacgtgggctcatttttggagaactgcttgtacattcagctgtccttttcactgttctgattagaaaaccgtaagccagacaccctaataagaatggcatactagccaggcatggtggcacatgacttttatcccaggactcaggaggcagaggcaggctttgcagccatttcatcaggtcaggaggattggtcaggcctagtggatggggctgtgatcccagctctcaggaggcaaagacaagaagattgtacatagagaccaatatgcactacacatgagacactgccccaaggaactaacaaaagcaaagaaggctggttcatccaagatgctgctgctgctgcctctgtgatgtgagatcatgggatttgtgtgagcctaaagggataatgtctgaggacactgtgtggtgttgctggatacatagccccatcctactgtttcctactgtattgacatctttatgtttgcattgctggtaccatgtgacatagcctagcagtctgcagctgacgcttggtgaacatttgataaatgaaagcctcgatttattcttgggcataccttgtcaaggatttgaggggcccatgtgagtgaattacacttctggactctaaacaggttgccataacgtaactgtgggcatagaggatgaatcttcccagctctgtttccatttaatggcaacagcctctcatccaggcatcccatgtgacatgtggtgcacaagcacaggacacacaccttgcagaggatgtgaccagcgactattgcatttccctgaccttaaggtctcacagggaagccagagtagtgggattctggttcagctcctctgtccctatccaacccctccagccactcccttccggactgttgttcccgaagttaaataccgatgatacgattataaaacacagtgcttctcatttccctcctgctgcctgctgagctcaagaaacccacgctatcactcacaggcatgtgaatgtgataataatgtaagtccgggcagctgtagacacaggaaatgaattttactgcagcaaaacgcaaattgcaaccattttgacaaggcggctaggaaaagacattatgggggctgctagggtgtgtccacagacaagagcctcttcatcgcttcatctttttttcttagagagaaaggggggcagggggcgggggggagtcgtttggaacattgttgaagcatggagctatgtttatctcccagaacagggaaaatggaaagtgcacacccaggctcccttacaccccagtaaggaagctgctctctcttcagtgagcctgcagtccatggatgccttgccaagtgtactgaatataagaatgcctggcatcacagagtttctaaacataaaatgcaacaggactccgtgtccttctgcatttgacacgctcctctctgaaagccagcaatgtgtcagctcatcacctacagtgccactaaacaaatgctgcttgttgcaccaaatattaagctaagtgttggggataatagaaggatgtggtttttctaaagactggaatcaagccttatttttttttaagctgattacaaaggtcttctgaaggagggcaatgattggcagtagcttttgtccaagtaaagacttctagctgtttgggggctactttaccaaggattagaatagagacctaagtaagaaatcataaaggctttctttcatcatacagggctgctctcttgtaggcctcctcccagagcatccaagaccaagagcttctgatggtaagatacattgtagatcaaatgcctattggggcacaaagatacattgtagatagatcaaatgcctctgggggctgcttcctgcgctagcgtgggggaaggaatagaaatgagataaagcttccctcaactcccactatcttatttcacatcttgagcttcagttctggtgggtatgctgaaggacaagccggagcttagcgtgttgctcctgacaagcagaattccacaggctaacattccaacccactgcaactgctctgaggaccaatcctgtgtccagccctcgttcagttctctccatgattactgtgttactctcacagcttcaatgtctctggggaactgatagacaggtctagcagaaatgactgtaactcagcagccttgaatgaatgcaggataactgaggtatcaggatgatcacgctgagaacagattctatgaacagattctccctcttcttctatccccgtttcagacaaaaaagatttgtatttttaaaattgtatgtatatgagtgttttgcttgaatgtatgtatgtatgtatgtatgtatgtatgtatgtatgtatgtatgcatgcatgcctgtattatatagtgcctggtgcccacaagaccaaaagagggcattagatccctggaactagagtgacaaatggttgtgaactaccatgtgggtgctgaaaaccaagcccaggtcccctgcaagaacagcaaatgctcttaacccttgagccaactctccagcccctcttggtctttaccaaattgtaaaatgttggtcttccctactcttacatctttgttgctcttcttggtagattttttgtttccaagtggaaaggaaaataagatcatctgagaaaattctatctctaataaaattttgtattaaaaaaaggtttcatttcaacacatgaaaactttggtgtatgctgaagcctgagatgtctttcctattagctagcccatttagtcattcgataaagtttggcactgtattgtaggaccaagcaaagaaccctactgctttttaggagggtgaccaaaggttggaactaatctgagcatgctcttgatgaagcagtctttgtttcccccacctagggaaaaatggggaatttcagataaaacgtactccttagtttcgattccactcacacctgtgaagacctagaaccatgagtctttggtggtttctgaactctcaggcagttttttgggttttgttttgtgtttagtcttttttttttttttttaaatcatgttagacatctgtcttcctaatccagtcacactcttcagagatggtattgggtacttcttggcacctagaaacatctatctatctatctatctatctatctatctatttccttccttccctttcctttcttcctactttaggtgcttgaatccaaggcctcactcatacaccgcaagtgctactactgagctacatctgcctcccaacaacaagaatctgagaaatctaagatacaggtgttcctcaactccaagaaagcacagggttttctgttgtgtatgtggagagtcccattgctcctgaaacttaaggaagaagcaaagaactaggattcgagttttcaggcattcctgctttaaccataaatgaaatgcacagcacaactggattctaggcaaaggccaagaggatcccatccttctgtctgtgcacgctctgatcagctgtttagtgagtagcttccagaagcccccctttcagtgagaaggcctgtggttggcactaagtttcacctaccaattcatccaaaacaatgaattcattcaaaacaatgaatgagcttctgtttacttacttttgacataattttatgtaattattggagaatttcagacagtatattttgatcatatttactccctagtgcttcccctaactactcccagatccatcctcaattccctacccccacaacgttgtatcctgctgctttgcctttaaataatccttaacatcccatctatgccttccataaactgctgggtgtggagacatcaatttgagcatagtcaacttaccaggggtaatactgtactggctagttttatgtcaacctgacccaaactagagtcagagaggagggagcctcaactgagaaaaacgcttctgtaagatgggattgtaggcaagcctgtagggtattttcttaatgagtgattgatggtggagagcccagcccattgtgggtggttccaaccctgggccagtggtcctgggttttataggaaagcagctgagcaactatgaggaacaagccagtaagcagcactcctccatggcttctgcaggtcccttgccctgcttgagttcatttgcctggcccttgccctgtcctgactttctctgatgatgaactgtgacatggaagcataagatgaataaactctctcctccccaagtttctgtggtcacgcacggtgtttcatcacagcaatactagccctcactaagacacataccgtaaggaaaactgactgtccttctaaaagtcatcagttgtccatacctccttggttggaggtaggagctcctgaatcctgcccatgctaggatgttgactagcttgatcttgggcagctcttatgcaggccaacctgggctccatgagagcaatggtcctgccatgttcagaagatgctgctccactccagacctctctggcttctgtcttacagtccttccacaccctcttctgtgatgatccctcaacactgggagtgtgtgaatatagatgtctcatttgtgctcgagtgtgccatagcacttattctctgcacttggactacatgtaagatcctgagttaactgccaaccattgcacaaataaacttatgtgatgaggtttgagaactaccctaatctataggcatagagatatacatttagaaagcagtttaatattacatccatttagcagaataacaataatacagttatcccttgagcctattatttcccaaccatgggttattggccagatatttagtaccaggtatgtgtttcctcttatagagtgggctttaaatccaatcaccaaacagttggttgtccccataacatttgtgccactattatatcagtgggcatatcttgccataacagtcatcatcatagttcaccagtctctcagctaggtaagactgttgatgactttgtttccctaataacctatatcacaacttctggtcttatgaaagctctccatcttcttgaccaatatcaacttgatttctctatgtcctgtgaacaatgtatgtggtgttttgataataaaacagggtcttactatcaagtgttactgggcaaccaggagtaatggcaatagtgtgtattattttttggttctccaggacatttctgaccaacaactcatgtggagttatgtcacacttgatttggactttttctttgtcaacctttcttttaggaggttcgttatcttctgtgtagggtaatggcaattaaactcatttatatgaatatatatatatatatatatatatatatatatatattcctaaattcacagaccacacacacacttaaaaaccttataacttagtaggattacatatagctttttcagacagccttagccctcctctgctctaccctgtcatccccacttaagcctgtctcccagttactttccttccagttactttccttccccctctcctatttacttctgaataataaagtgtgagctgggatagaaacaggagcagcactacatctgatgtcaaggagtgatggtctatgaaacacagacaggtgaatttgtattaacagtgtaagacacatgacaacagacacaccaaatacatcaagaatttagagaaataactcaggtaagatggtctggaagtgtttcacagagtaatcactattagtgataagagttttccacaaagacttaggacagtaaggaaacaacattccaaacagtgagaacaacattggcaatgtcacagcaggcctggcataaactctgctgttagcatcttaatttgaatttatttatcaagttgttaggtcactggaggaaaaaaagaaggtcctgggaaaaaagggcaacagaaaaggagctttgacagaaggacgatactgagtatcctgagggactgtcagccattcatacttgcagcagatttactttgaggggtagcctttttctaattcccacaaaggcactatcaaggctagtatactagtcaataaatgtaggttgtcatgcagaagacaaagctgagtgggaatagatgtcgtaagttctgaactgagataagcaagtgccagtcctgggaaaccagccatgatctgtttctagtaatagcttggtcaagtccacatgtattggccaagtaaatgctgaaccaggagctgatgggtgcatccgaacctccttcagtctaaggtgtctcccagtgagacatcccttccattctctattatgtcaaattacagaatgttaagtttatagctacccaggacaataatgcccaagaacaatagggttggcagttaaaatttaattttttaaagttaattgacatagagcgattatacataataaagagagggagaattaatagcaggggaattctacactcttcacaggtttttaatccagtctgggcagctggttgttctaagaacaattgcttttctccaaagaagaaactcataatgccctccctagcccccatatccaaactgctagaccaccatcctgattaagcctcctgacaccacctggtcttgggcctgtgcatgttttagagtggaggatacaccctctcagcatcctgaagctttacaacaaatggccactgtaggtagaagcccagtccctacctatttgcccaccagagctaggaaatgtctctgcagcccacagccttgtgtctacaacttttggggaaaggttccagcttcctctatgtcaaccttctgggtcttaggacagttttaccatagcctgcagctcctagattatggcaatcagttccccacacttggaactattgaacttgccatctaaaaactagggcaagtcctcgccccacctcaatgctttggaattactccaaaaagccctggcatccaccaaaattgcctcttaatgatggaagacaatccctgtaactccaggatggtggctgtcaatgctaggagcttgagccccaccagcactggctttgcatagcctagaggcattcccacctgcctcgcacagctccagaagcacaggtaccgatatctgcctactgttggaagggttcattcattgggcatgagctgtcccttaagccttccgttcagtaacagttttttgaggactcccaggaccacaaatggatctctgtgccagtgtgattcctgtgactcatggttgcacatggatagcctggcaattaagtcttacctccaggctcacctggctcaaccctacactattgtagaactgtgaggctctgagggcctctcagcaggccctgtgttctctctcttgcttcatcaccttcattcatcattgctctcacaggtgcaacttccctggctgcccctgtttaaatgggactttggtctcatgactgaattagtgacaatgcctgatttaacacatagacattgcatttgattcctgcctgccataaggctaacttgtgttcacagcctttgtttccctgaggttcaattgtctcttttccaaacactgaaatctccatccaggtcattgcttacatcctctttctgcaatagactaaatatttttcaagggagacaaaaccaattcaccattctctgaccacggagcaaatgcaactggtaacaagtttttggtgatttgtgtgaaagagaagcccataattatttaaccaaatcattctgtgtctgtgtgtgtgcgcctctctagcctctcagtgttactcaagcacgcccaggagggagccggtttatagcagagatctgtttccttcactctcctctccacgcagagccaagatttttctgactgcatccacaggaagacattatttctcttgtgagcctcatttccttttttctttcaaacactctgtctccaaattcttcataatttctacacaagaacctacacattgcatttgtactatttgaggaaatgatatttcttattctgaagatacttaacctaccacctaacttatcaatgagatgcatgtcttagatgacagatcttcagctctctcaccttctataaagtaggaaaaacatcctgccatgtcaggttcccaacaaacacaaggttgccaatgcatggcctgcagcgcttcttcacacagtagcctcccatggaaaaaccactacattaatgtatctatagtctttgttcaagaaaattctgctcatattaaaaacaagacagcacctgctacttcaaagcatcagcctgcttcttgattattatatctgttcttgtgaattggaatgaggagttggtagggcatgagatgttttggttggatgactacagatgtctaatatccattaaagcagacctctagccatacctatttgtgctatcacaaaagagttccaggttccaaccagctgggggaagcaagaagactgcagggattggcctgagtctttggttcttaccctgagaacaacaactaaaggtggtcaatagcatgtcatcaaacacaaaacccacaaaatatctagactcactagtgctaattatacaccatataacatgctattctcaatatgggttagatattttagagaataattagtcattaatttttgtaaatgtaaactttcagatctatttactactgagacagtattcctaaaaccctgtcttagttatgtttagactgttgtgaaaagaaaccataactaagacaacttataggagaaacagtctatttggggcttacagtttcagaggtctgaagcccattaccattatggtggggagtatggcaacagacaggcatggcactagaccagtagctgagcatttacatcttgagatacaagcaaaagtcagaaagagctaaatggaaatggcttgggtttttgaaatctcaaagcccacccccagtgacacacctcctccaataaggtcatatctcctaaaccttcccaaacagttctaccaaccagaaactgagtattcaaacatatgagtctatgggggctattcttattcaaaccaacgtaagacctctgtgaggaatgctttgatgaaaacacttccaatgtggcttggtttgttggtgggagcggggactgccagtggcaccaggacttattgagggtgcatgaactggctttttggaacccattcccattggagggataccttgctcagtcatgatatggggggtgggggtaaggagccttggccctgcctcaacttggcatgccagactttgttgactctcgaaggaaggcctcaccctctctgaggagtagatgaggggtgggaaggagggtgatagagagtggcagaaggggagggaggggtaactggggttggtatgtaaaatgaaaaataaagttttaaataaataaaaaagaaaacatttgcaaagctcttctatgtctaaaaccaaaggccaacatggcaaagttttctaagatgacagtccctcactctcacacaccatccctcatcctctggatgaatatggacatggacatgtggctaacaggtaaatggacttgctctggtcacatacccacaatgctattgaaacaaatgtgagacacacagcatctgccttgtctctcattctcaagatcccagtagtcctgatgacccagttatgaatctttaccttggaagttgatggcctggtgaaaaacacataatccagagaccaaaattccaagctcaaatcatgtttccatcattagctaaatgcatttgagcatttacaaatgaaagcaggaaccaataactgacactacagggtcatgatgagaagcagattaaatagagagagagctccatgtccactctgaggcatcagcaattattagatcatgtattctcattgatttcggcattgccagtctagttgcctcatagtcaaggggaaaatataccctttggtctccgctttgtcttaagctttgtcttattcttctagtgcagctgttttcaacctgtgggttttgaccactttggaagttaaatattagatatcctgcatacccaatatttacattttgattcttaacagtagcaaagttacagttatgaagtaacaatgaaataattttataattggggtcaccactgcatgaagaactgtactaaagagtcacagccttaggaaggttgagacccactgctctaatgcaactttacaggaactcattatatatttcacggactaatgcttcaccttcaaacatgaatgaaaagcacagctggactttgaactttgtatttgtgtccctggaaacttagacttggttcttaactatggtaactatataaataacctcaatatttttttcaagacagggtttctctgttagctctggctgtcctggaacacactccatagaccagactggcctcagactcagagatctgcctgcctctgcctcctgagtactgggataaaaggtgtataccatcattgccaggcaatattaactttttaattagaattttagggctttgttttgtttggggttctgggcccttaactcagggccttagagctcgtaaggtaattgatttaccatgaattatatccccaagccctagaagatataaatgaaaacccagcctggcaaataggagaatcagagtgactttgttgtatacaagttcttccagacaccaatgagaaagaactcattttgggcctcagctgtgttaactgaagaaattagaagtagaaaatccaagaaaattccttgggctaagtgggaaaatggtcaactcagcaacttgtctgtgtagacccactaatagccccctccttcatatttctgcactttaaggcacaggaaggctgtattgtttccccattgcactgagactatcacagactagagccactagcagaatgttccctacttccttcttttctttcttcctttctctttctcttgtcctacctccattccttcctttcttagaatctaaacaagtgtcttctctttccatattggtcactggctaccatgggaatgccaattttggggagataaggtggctcgtgagtgtgagtgtgagtatgtgtgagtgtgtgtgagtgtgtgtgtgtgtgtgtgtgtgtttgtgtagagaaaagagtcaatgtctgtgtcttcatcaattacttctctactttacttttgataggatctctcatcaaggctacaactcaccaactggctaaagcagctggccaacaagcttcaagggttctccttggtcccaaccttcccagcactgagatttcagactgaaattagagcgttgacatggtgtcagggatctgaactcaggtccttgtgtttgcatagtgagtactttactgtctaaatcagccccgaagacatgccagtttctgatcctgcaaaccacacagtgtttggcaaaaagagatgcatgctgggtgtttgtggaacttttcaagggtccgaggtctctgcttcatagtgatgaagttcatgtattcttgcatcctagagaagggtcaacagagagctgttgcctaatgctgcagtggtcttgcttgatctttgtttctttgtcatttattgtggctgcaatgacttgaaagagccaatcaagttaaaaagaaggccagtattataggctggaactaaattgggagccagagtgccctgattccagttcttactctttaagttcctccctttgcctcagttacctctgttttctgtaataagccttgagatgcccacattctttttaacttctactactactacaaaaaagttgtttttcactataaagtcagactacataaaagattatcgactggcacagagcgtttcttgataagtttaatacactgtgctgagagatgtctccccttcctgttaatgggaggaacaattcaaacaatggagtaattcaggaaatgtttaccagggtgagaagagctgcattcctacaatgaaacactgtatatgtttcactattccctgaaaggaaggcaaccgctctgccctggcaaggccttgacccaggagccccctgcctaattgatttgaaagaaaatctactaccaattcaaaatgttttcttttttttaacagctgttctatagaaaaagtttctgggaaggtaattttctcattaatagactaatggacctcattcttattaaatctccctggtcttttaagtgagtatatctaggaaagcacatttctccccataaacccattaacttgctaattatttttggaggaactagttaatgactattatccccccagttatgctaaaccagattctcaacctctttggctcctttaccacagctgagatctgagttgggtattgtcccacgtgattcaacatacccacggaatcctaccaaagggtccaaagagaactgcctcatggatactgccatcaagtgagttgcaatgggtttcatgagcaagaggccacagggaggccattttccaggtggatgtaaaaacactgaggatagatatccttaccaccccaagtctgctggttttcacgggatgcttttttcttctctctaagtcaattcctaagctgaagcttgaacccaccatgtggttgtgtgaagaagtaggaccttcaggttatttgaggccatgaagttggagccccagtggtgggactaatgcccttggaggaggttgagacagcagaacttcctttctgtcccatacccggggacagagtatgagagaacagtcatacaagccaagaaaagagaactcacaggacacaaccacactggcacgttgacctcagagacagagaaatcaatgttgtctaaagcacttagtacatggtattttgtcataacagtctgggctgatgagagctgctttcatttctggaaaagaattgctctacatggggtgacacaaagacctgagttcagaatccagaatctacatcaaaacaaggtgtggggagatggctcagcagttaagtgcactgactgcttttccagaggatccagattcaattcccagtacccacatggtgggctcataaacacttttaacaccagttccaggggatccattactctctttggcctccaaggcaccaggcaaggaggtagtgtacatacatgcaggtaaacatccatacacattaaataactaaatcttttcttttaaaaagggtatgtgtgcagtggtagacatccttgctccacactcaagggctaggtatgtggaggcaaagaatatcctgggtgttcactagccagtttctataatgaaatggggagctgcagattcagtaacagactctgtctccaaaaaaataaggttgagtgataaagaaagtgccctctgtcaacctctagcctccaagggtgcacatatgtgcaagcacacaagaacacacaatatgagagacacagagagagagatcaaatgagaaactgcaaagacatccttaggaagcctgaatgagtgacgggtgtgaatcttggaaacacaccgtgagcccgaagcagagaatggcaggacaaaatcactgtgactgtagatgagtcatctgtgtggatagaaactgcagtagctgagtgtagcataggccttccaaactctccttctcagctgcaaagagagcagaaatctcagagcctcccaggcaggatttcccacaaagtcatgttggtgaggctgacccctcactgggctcagaagaccagtactaaaccaagaaagaaaattctcaagccttgggtccaatgcacttgccatgtgaggctttgaacttgctacatgccaccattatgttttccccaatttcctctttgtgcctgccccaggactgcactttggaagcatagaacttgcctggtctcacaggtttacagttgggaattcttgcctgagaacaattcttggcttgagtctcatccacacctgagctacatgacttctagatgagaccgagtgctccagagctgcccaggcctgacttcttctctgaccctatcaggctgacagacgggtctgatcctgtagctttctgtgaaagaagcctcattccagaagcaggtactggtgaggggcaaccaagccctcaggaactgaagagatggccacctcaggaaactggcctgtgaccagagcagcagtcctgatgatctccaagttgcttttaaagtcatctttctctttttcttgaaggacaaaatgtgttcacagccaaacatccccctcatcctgccctgtagagtctaagcagactagcatccttcctttaaccttctttcctgcctcctttgacattaggtggcagtattcattataggacaaccatatttctattcctggcttctgcagaaatatctaatgaagaccccacaggtctccacagcaagtagtatccaagcataccgttggtggtgtttttagaaaaatccactgctcacaatttggttttccttagaaattcattcttcaatttctctgctctctggtttccagtgagaagcctggagaaacccaccaattccttcaacaagctgattagaaacctccccagctgaatatcaatttcatcgattgcaaattctgccttccacaaaacacttgaagatgaccacaacccagagaagttctttgcccctctgtaagggtcattattccccatttccatctgaagtctcaccagaatcaccccttgtttctaccaacgttctgtctgtggttatcgaagtgtttgctctctatgatgatagtggttctctctctcattttttttcttcctgctacacaccaaaatcacctctgatgcctacctacatttctatctagtacacaggccagaattttccatgatctacctactatccctttccgaagccaattccacattttcaggttatttgttacaccagtactctcctggtaacaaaagtcctaatagtgtattaggatgggtgacctaacaaaataccaagcagttgctttagacaacagacagaaatgctctctgaaccaggtactccattgtaactgtggaccagactctagaacagctttacccaagtctatccagtatttagggataattctattacaaactgaccatgagtttaacatctgtttcacgaatggtgaaggcatgccataagggactatcacttccttgaatctccttaaatctaacattggcacaggagtccaattagctcgtacagagcctctatcatttgacaattcctgtaaggttactggatatattaaggttggctgtttgaaaaccttaggctgttcctctctaaactcataatgcaatgctgaaagtggttctacgttaaattcttctgtttgtacataaatatctttgtgatccgttttattattaagttttcctaaaacttgtatcttagccctctcattaaccaacttttttagtgataaagcaaaaactgatcatccttataattgaccttattctcatctaaattagttatcccctcatttaattgttcctttttcaaactgtccagcatattatctcatagagacctaaatccctccattgtaacagcgtttcccattttataatgtgggaggaaaaaacctctctttcaactaattccttcctttaagaattcccaaattcttaccaaatctgctgacgatgtcagtgaactatgagacatagcacatctgatcggagaattagcgtgtaactgtgagctgaaaatggcagcccaaggagaggagctatagggaaaaccctcaacccacggcaggggggcaggtagtggtgggggggagcgagccgtggtctgaaaaaaattatgcacaggggattgttaggatgaaacacgtgtggtgggagttgccagaaggcagagccagctggtctagggcgagtaattcctgtggcctttggagcccaggtgcttctggagtggcagctggagactgttttagaaaggctgcaacagaaaaatcccaaactcactcagagaattggggaaaaaaaaaaaaagaaagaaaacctagcgggctgggtagtggctccagcctgtgctggtggctgcaaagccacaggcaaactgttttttttccccctatttaagttgcatgccaacatgaataataaaaacctagagtcagatatggggcgagtgggtgagctaaaagatcagagaagcaaagcagccaaccacctgagagttcttacctctatctgcactgagatcctgccttatattcctctctagtgctgggattaaaggtgtgagctctgtttctcttttagattgattcactctcatggagcccagggtagccttgaactcacagagatccatctgcctctgtctccctagtgctgggattaaaggtgtggccaccactgcctgtgttctatggctaactggtggcttagttctgcactctgatcttcaggcaagcttgatttgttagattacaaacaaaatatcactacagaaatgtctttctcataattctgccatccatgagtccaagatacaggcactgttcacttccagttgtcataaggccctgcttcctggatttcaggcagctcccccgcccgccccccccaaaaaaaaacagcacaaattctgttttgcatgcctagcagtcacaggtagtagaaatctactttccaatcttccccttctgcctaaagcactgtagtttcacgcccccccccccccccttttaagttcttttcttctcacttgtgcttcaaggatgctttcgctcttctcaaactggggcattataatatggagtaagattgaggggggaaggttaggtgggtaggaagtgtgtgctttaaaacacatttggagtgcctggagagatggctcggtgactaagggccatgttaactactcattggctttcttccagaagaccagagttcaattcccagcaagcacctgcccacatggaagctcacggtggtctgcaattccagtcccaggaatccactacctcttctggcctctacaggcaccaagtacacatatggctgcatggacatacattcaggcaaaatacacattcacatacaataaaaatgatactaattagactaccttggctaactttataatataccttgctttcaagtggccttaaagcaactaagagattggtagccacactacaggttgtcaagaatgaagacaggtctgcaattttaccttacttaccttaccttaaagtaatgagttagctcaccacactttgcaagaatgctagtagaggccatgagataccagggttcaaaaatagagactttccacatcacatttgcacaggaagcggcactgggcatcaatagatttgtgttactttcctgccccaagttcccatggtggtttcctggctctggcaaacacctgagtgctcaggggctatagtatggtaggaactctgagcttaggaaaatggagtctttaacagtgggcagtaagctgctcgtcttttcactgtttcatattataaatgtatatattagatacatatgtgcctctgtgtgtgtgtgtgtgtgtgtgtgtgtgtgagtgtgtaaatgagtgtgggtgcccacagaggccagaagagggcatcaaattccctggagctggagttacaagcaattgtaagccatccaacaacatggatgctgggaaccgaactcagatccttacaagagcagcaaatgtccttaaccactgagccatctcatcagctcccagcttttactctcaggaaacacatactattgttgctataccaacatccttgaagagaaagtccctaaaaggaacaattagcatgcattttacttacaggacctgcagaagcctgagacctgccacccagtggcagccatgaaggtgggaagcagagacctcagatgtacagaggtgactgtacatctgtgttcacattgctccttttgtagcccttttactccacatcatctccagagggaaacaaaatcagccaagcacagcagtaaaaatgttcaaatgtgtggtggatttgaacaaagtctgagaacctgccacacctaactattctgaatgatcccaacagcatttagcctctgggtttctacactgtgccacctttgtaaagcatctcataaattggtagtttctaactatcagttgctcacaagcatgcaagcactaagacctacatgcaaggcacaatgcaaaccatatcaactaggtttggtgatacagacctgttactgaggagactgaggcagatggacagtcacctaagctctgcagttcaaggtcagcttgaaaaacttaagaagaaacactctcaactctctcaaacttttgtgggatttttgatgttcttgtgtgtgtgtgtgtgtgtgtgtgtgtgtgtgtgtgtgtgtgtgttgttattgtttgttttttgctaggcaggctggcacactcctctaatcccaggactcacgaggcagaaccaaggggatctctgtgagtctgaggccagtctggtctacagagctagttaagaggccaaccagagctacacagtgaaattctgtatcaaaaaaaaaaaaatcctttttaaaggatgctatctgtgactgtagttcagtggcaaagcacctgcttagcatgctcaaaaacctgggttcaattcccagaaccacaaaataaacaatatcaacataggaaaaaactagagaggaaataaatgacaccgctactaataaaaccagaagtatttattattgctgaatggtataatataccaaaactatgaaaaaagatctatgtctagaagatactatgctaaagtgaaagaggccaggcacagaaagacatatactgcatgactttacatgtggaagctaaaatagttcaatctcacaaaaactgagccaaatgatggttgccacaggctgagaaaatggagaaatgggggaggggtgggcaaagggaatgatgtttcattttatacaagtcctggagatctaccaaacagcacagtagccatagctaacaagactacattgtattccaaggtagccatggtggctcatgcctgtaacagtacttgggagatggaggaggaaggatcaggtgttcaagattacccccggataaatagtgagtttgaggctagcctagattccatgaggcccttcccaaaaagaaggggaaagaggtgaggtgggaagaggggagcagagggagtaagaaaatagaagggagaggaggaggaggaggaggaggaggagagaggaggaggaggaggaggaggaggaggaggaggaggagaaagtgattactacattgtgtactttaaaattgtcaagaaggtaaatccagagagaagttctttaaccaccagtgataattacagaagcaggaggcagctttaagaggagttatactcacagaaagttcccagtttcctgaggaataaggacaaatgtttagctgttgaaataaacaaaatagcaatgttgctacagatactgcaccataagcaagctgaccagccactggataccttgtctctaatgtcaacatcaacctttgagagaaaaacaagttcccagtacctttcagaaactatcccaaatctactgaaaggtcaggaaagaatgctttgtaagccagtagaggaaattgaatcttgagggaatttgtttactgggcagaataaggtagtgcccttggaagcccagacactggccactggaagatatctgtgtcttagggtttctattgctgtgacgaaacaacattactaaaaagcaagctggggaggaaagggtttatttggcttacacttccatatcactattcataatctaaggaagtcagcgcaggaactcaaatagggcaggaacttggagacaggagctgatgcagaggccatggagatgagctgcttactggcttgctcctcatggcttgctcagcctgctttcttatagaaccaggaccagcaacccatggggttgggccctccctatcatgccttacagaaaatgccttaaaggcttgcctacagcctgatcttatggaggcattttcttaattgaggttccctcctctcagatgacttgtgttagttgagatgaaactatccaaaagtgtgtgaagaccagtctttccaacttcacatagcatggttagagtctactcacggatagaacgtgggtaatactcaaaagatttaacaatgtggtctgggcactgaccaatcagaacatgatgatggctggaccaccaccagggaaggtaagtgctaagcagagaaaggcctggagtgtgcccagggtaggccccatggctcagttagcaacaagaggaggaagtggcactcagaccaatggcttttcaccaagaggccacttcaatacttaataactaacgcaggcatgccaattagcagctgatggctcacctcagtaacagtactttccaagcacagacctaagatctttcggcagtacgggaaatatttatatttgctcacagatttccctacctgaaagtccactctgcatctctcttcaccgtcacactgaagcaccagcaccatgacaacagacatttctgagccggtgggggggggggtgcagatcaggacccaggccacagtgagatcccagatgcttaaaggataaatggttctaattcattgtgctcatctgaaaaaccttcctctgtcttgaatacattatctcagcactccagtgtcttagggaatcatttcatcactaaattgttaccttagaaggaattctctgtgttgctgaagcagaaatgaactagccatgcagcaaagcacctactgaatacagctgctcacagcactgagtggtagagctaagcagggattttaaatgtcaccgtgtctacaagttgcagagccacccaatatggtaagctatagatatgtgagctattaggggtctgcacttggacatgctgtaagtataaaacacagcagatttcagagaccttatatatcctggaaacaggaatatagaagatagtctgaactgggcctggtgttgcaggtttttgactccacctactcaggagactaaggtgggaggatcacaagttcgaatcctgttcagactacagagtacactcagggataggtaggacaagttagtgacaaccttcctcaaaataaaaaaaaatccagggtgctggagaaatagagatgcttcagaggttaagagcattggctgctcttccagaggacctgggttcaattccaatcacccaaatggccgctcacaaccattttaaactctagttccagaggatctgatgccctcttctggcctctatagataatgcaggcatatggtgcacagccatgcatgcagagaaaaaaaaataatttctttttcaaattttaaaaataaaaaatgcaaaaaaggctggagatataggccagtggtagtgcatttgtgaggccctgggctcaatttccaatactgttttaaaaaaacaaaagatgatctctcactgacaaattttattatagaatatacattttgatatatttaaatatatttggtaaaatattgaaataaacttcatccattactttttaaacctttaagcattcagctacttcaaatatgttaataatatgcatagcttctattttcagcttacattctgcttttattggtttgcataagtttggggaaattaaacaaccttcaaagttctggtgaactaccatgttagaccctgaagcacattccagaccctggtcttcactctctttttgtgccctgtccatcccaagccctggaatccttggtgtgaacacttcagcactgttggtgtgaacacttcagcaccgttggtgtgaacacttcagcacccctaggtgggaacacttcagcatgagcagcagtgagaaaggacagcaagaaatctctaacaaccggctccacactgagtgtgactgtggccagatctttaatccttctttattttgattttctcatcagcaaaatggaaaagtgtaacccatacctcgggaacttgtaaggatgaaatgaattcttagataccaaatgttagaaggccattacaggcttttgtcaatactacataagttcagtgctgttgttcttattcagctgtttaaaattgaaggccagaagacttcttagtaatggtaagtcatttatgttgacaggatttctaaaatcacaagtactagtctgacttccagttcacttctgtccccaggaaatctgttttgatgcactgagagtggtgagcttatgaagactgtgccctgtgagaaattgaaacactgttagtgagcaagggaatatgaaggacttgggcttttgccactggtcacctaaaacagcaacctgatctatttcctctgttgtgcgggaggaggggaggcaagagtcatcagcccctcaaatgagcttccgctatcactggagagttaccatggaaactcaggacagccttaataaagacagctgaatcttatctcctcagtttactgatgaggagtggatctcttgatttgccaaagattactgcaaattagaagccatgctgggacttgtaccaaagtgttctggcaacttacccagagagcttagatgacacctaactctttcaggggttggaagttaaaggcactaacagaaaaatcaatccattcagcagatgatgcagcagtatcaaggggaatgttcagaattctggaagaaatatgaattataaataatatttctaacacagccccattgaatctcatagtataatcaatacaatctgagtttctcacttatcataatttaggcagaaagacttcagctttggaaaacatgattctccttcaagaaaaaaattacttcccacaaatttcacatgctcaagttgaacactttgaaccaataaatacactttgtctcgatggcatgtttttggacattctatggtttagcaccaagatataatcacattgtcgtagaattaactatcccagtagcaaattcaaatcacttcgtgagtggtaatctcacaatatctgtggagacatgcatgcatacatgtgcacacttgggtgaacacacagaatcggccttattgggctgtactgaagtgacagccattgtctttagtgtctaatctcattctggtgtgctgtgtcatacaccaaccaaagccccttccttattcctcccacctgccaatctcctaatgtagacacatattaacgataagcaaggagaaagacttgcacattgaacggcaatttgaatgtggacagggaaagtttaagcagtattctcacgcatgaattatcttcagctccacatctccaaagggaaggcagatggcagatgttgaaaggtatgagtcaatggcttgtagaatgaagagcatttgaatggaaagcttgctggtgggagagtttccagaaggcttgtgctctgtgataaaggctttggggctggaggtgtatcttgggagatgagtgcttcactaagccagacaaggttttagatttcaatcgctctgtttactcttgttctttaatttgttcttaaatagcctaaaagctcaaaggaaagggaagaagcatagagtatatagaatatcagactgaagatgggtttaaatacaaaatggccaaagcagaataaaggatggccattcctaatacaaaaacccaaaatcaaaactgttccaaaatgggatttggagagctggctcagcaggggttgctcttgccagggtttggatcctggagtatgtggtggttcatatccatctataactccagtcccaggggatttgatctccttttttgcaggcaaaacacataaaaataaataagtctgaaagtattttaaagtgttccaaacttggaaacttctttagcgatgacacagtgccacgagtgaacaatgcgacacctgacttcacagtctaaaggcaatgcccacaaaatgccttcagactttgtgcatgaggtaactatgggacataaatatgccttaatgttaagacaggttttaccaccaagttatagtatcacatacatgcatatatttccaaatctgggaaaagttcaaatctaaatcatttctgctcctacatattctggagaaaaggggggcactcagcctgggtaggcaagcatttcaaaaattaccttatatctttcatatcttgaatctgaaattaatttttttctttttaaagttaatggcttgacatgacagctcatgcttataattctcatctgggaagatcctgattttttaaaagcaaaattaaattaattaaagtgttagcaaaagagttagaaatgatagtcccaagagtacttaagaaacatagaatgaagagactccagcacaaatcagaaagtaaaagagacacactgctaggacaaatagacataacaattggcagtgagaaaattagtggggaaaagagaaatgaagaaataagtgatgttttgagatttaagaaaatgtatgggcttaaatcctaactccagggtcaaggtttaaatctctttctggttgattgaatttcacaagccccaaagaggttaaagaggagcaaggtctactaggcatcaccacaacacttagatccttttttcaaaaaatatctccatgtcttaataaaattaatatttttaaaatatttggagatacagaagttcttaaaatgcaccaatgtcttaaatccttaaagttattaattgaatttgataattccttcaattccttaataattattgactaattcagtgaattattaaatgacattaattatattataagcagattgaaaaatgatcaaataattaagtgaaatccatagatttaaaaagaatactaaatgttaaaaaaataggcatttaagggcttagaaaaactcattttttatgtttttccatttaaaattcaacatcaattaaaacaagcagttataaatgttgctttgctcctaggaaactgtttcaaatccttgaaaactgcactgcagaaaaacagcaagtacatgattaaatggatgatgtgaggatcagaggccctgctccacgtagcccacagccaagaatatgaccctacttccctggtccatgttagatgttggtttttgtatcttggaattcctggtgatttggagagaactcatggatatattgagtactgataatctaagagcacagctgaatggatactatctttaagtagatatcaggcaaattgctattacaaaagagcccaaacctttatagaggggctctgtttcttccttgggatcattggtgcattggtctatgagggtagagggagcagaagtggggaacaggcttctgatggctgtgggtacatggagacaaccatccaggagatgacttgagtgatgcagctcagttttattccagagtatgggggatatacagggttgggaaacctggggacaaaccctactttgcattaagaggaatgttcctatcttaagtctgggttaatggcagcagggtcctatagcaaagctcctagtacaagtcttagttaccatatgtgcagcagggaaggcttctagcctccctgtgacaagggtcatgctacatataaatcaggcattctggcttacagacagctttcaggtaaggtcagtcctccgggcccaggaactttctccagataaggaaaggtagagagtaggaaataggaaggcagtccccatgtccctgagctttggggaaagctgccaggctgacagacagcaacctcagaccagaaaggccttccaccattataggtgctaggctgacacgaacagaccagttcatggttatcagaaacatgggcttttccaaacattgccttctcatttcaatatcctacttcctcatggtaaagacagctgctgcagctcctactattaagaccttacccttccctagaagggaaggatcacttcctattaaggaagcaactcggaaatggcctatattgattccattgatatcttgatgtctgtaacttagctacacggctacctctaacagcaaggaaagctttgaaagttagtctttaactaggagtgactggatgaaattttcagtattggaggaggagaaagtaatagatatctgtgtgacatctagtctccctatgccacttttaaagctgaaagataaacatcatgttcatggcatctgttcatactcctgcatcaagaaaatttgataacccaggcaacaagatgcaaacgataaatggtccctctggaatatcagtttgtcatccagtgtcagtgcataaggaagtttgcatccatacaaatggagaatcagtcatggatttgtgtttcttctattaacatggtgccttaactcactatgcttactctacttttataagtcaaaataccccttctcttctgcaacactagaaacatcaaatggcaacattttatctcattgtgtaagtatttatggagttcagccactatacaaagcattgaagatctatggtaataaaaagtctcttctccccgaaaagtttgatggtagcaggggagatgggtggtaaatagagcctatcccagaatggttctgctctgttaatgtagaagatcccataaaggatattctcagagacttaatttgaatgagggaatcaacaaaagcttctaagaggaatagatatttaagatgcattctgatagatgtccattagcttggactaagaagaaagaattgtaggagtaaggattggtattgcagaatctagtacgctgagaggggagagtttaaaagttccaacaaaggttctgagccaaagctaagtcccctggagataatggtgagggggtggggaggtcatcagaggagaaagagaaggtctcaagtactatgtgcaggtttcagatctgtgcccatgggcaataaagagaaacagaaagttctgtagcaggaaaacagcagtctcacttatatctctaaaaggctactctgatggcagggtagagagtgaactccagtctgggttggagatagcatagagaaaagcggtagaggaaaacagcctaggacagcatggagggtacagtagagactagtttactgcatagactttggtgagatattggttgtgggagacagaaacaagactgtaaacaagaccagagctctgaagtcaagccatgtgggttcaaaacccagctctatcatgagcattgagcctggtcccagagcctcagtttccttgtaggtggaatggataggaatacattagtggcatctcaaacttgcatggggaagagtagatggtaccatttagttcaggtgcctggaataatggctacataaactttacagctttatcagatggtcctattgccactgttaattattatagaaaaaagtggattctggtttgaataagttatttcagaataaagcaatagaagaattgaaaaaattctcaactacaattctaattacatagcaaagtcttactatatacaatcaccagggaaattatttatagaaacacaggaaatacatttcccaaatctaatcttattcctgggggcttgggctcaattaaacataaatgtatatccaaaatgagcaagcatcaagatattggacatgtaatatatctggagttttctaattgttctttcttcaaggctcagcccaggtctgtgttcttttgtaaactgtctagttcatctaggaccacagaaatctttggctctggaaggaattccttgtatcactcaggtgggatttcatataaaccagtttagaagaggaaagctacatataactgaagcagtgttcaaactcagctctggtgagtgactggggcctctgggatcagcactgtcctccctgtagagttcagggtctcatgtgaagctgctcctagacccatccattgcctagctgtaacttctccatggttgtctggacagcagagactggataatatgtgttggaacgtgaacatgccgtttctcctaatctagagtcttttatatactgtacaaatccacaaagcaactctttaaggtcctgtgtgataagaccacttgagatagatctcagtgggctgatggcacaacagacaggcctcttctctaatctaatttcagcaccaagaaagatctaattgaatcaaatactgtgtcgataaccagagcattttcactgtttttatatttgtactatctggttagaggagtaaagagaggggggagagaggggtacaagtcagggagggaggcaaggagggagggagggagagacagagagagagagagagaatcttgtgctctgaattctaagatctttatacaaaacagtgtcttagcagggacacaacttagaatcaacattgccacagaaaccatgaagcatgaagatgaaaccatcttcagcatggagacctgagggaaagtgtaggctggccctggcctactcaactgggctcttcttccaattcacagagatgacccagtcctttgacacctccccactcttccagatccttctcaccaaaccacatgaagaagttttgcagactgtactaaggaagtaagcttttggggttttcccattagtagaagactgacacatttgtgaacaatagatacacgatgctacagaaacatgagtctctagatggttgctctctaggctgttctgtgtatgcagccctgcttgggtagtttgagaggtactctctcactgttgttaagattagatgatgtgtctacaaatgctttatcacctttgtttatatgattttggttagtagtacaattatcttatagccccaattccacagtcacggggaaacaaatacaaagtcctatagataggtgagttcctcaaggccttatgcatgaccggctgagaacacccatggacacatctgaaccatgtgatggtgactaacatggcaatacagaaaaggcctttcgagtaaatgaatcttaccatttccttgcattcattaaaaatcatacaaaatattataatttgccagccactggattttgagaaaagcagaatatatatgccaagaatctcactcttcacctagaaataaccaaccaaaagtccatggaagtggattttcaaagagaagatagatggtagataggtgatagatagatagatagatagatagacagacagacaggcagatagatgatagagttcattctagaatatgcttccttagcaacactaaattcattttagaaaaaaataactaatgtctatgagctacaacagacattgcagcttacgagaacatatcttctgggccatacatcaaaattcaagtagccacaaaatgtgagtgcctcgatgaaacaaagattacaaacatacatatgtgcttgctttttctttttggtcattgtctggcagctggacaaaggcaaaaaaaagccccatatgttgcctgtatcatggagttcagtggcacagatccataatctcaacttgggaggcagagtcaagatcatgagtttgatgacagcctggacaacatagtaaaatctgtctcagaaaacaaaatgtcccacttagattctgaggcccctttatcaagaagatgaaggggaaattgcttcgacttcaagacagtatctccctgggtagatcagtcattggtgcctggggttctatagaaaggttggctttgggattccagtggccctcagagactgttcagctcaagagctccaagctgaagagttcaaataagcttagcaagtgtggggttcacccagaggacttattaatacatggattgatagctctcctctcaaagttgattcaatgatccacaatgcaaactgcaggctggcacttccgccaaggactcacaaggtactaatgccagcactgccgatcctgggaagtcacaggtagagaactgctgatagaaaacatggtggcagaactgctaagactatgaggtcacatttcatcttacaggtgaaggagggctctaggttcagagaaaatgtcatatttgtggtataaaccagtactcagtctcttgttctgtacacaaaataaatgaaatttctagggttaaaccaatgattcatctcatagttccttaccctcagaagacacattagtaatgtctctcagtcacaaatgggctacctgtgtgacattagtcctacaagtttatattagagctgacattgatgcctatcctactctactttatgtatttaaatatgtttagacgcactgctgctatctataatattcagggtactggcttaccatatggattcacagctgagaagccacaggctgtaccacacaacctactgtgaagcaggttagaccaagcaattttggcaaatacccaaggatgcatctcagagtgtttgccaccatgtggtaacagatggctgcatttctagtgcacagtgggttgcttttttctaggaataaacaccaacagcagagaaataagctgttggccctcctgccccagcaggcagcaggatgggaaccagagggagtgtgggttcaggatgcatttccagattcccagagtcccacctttttcaggaaaacactaagacattttccattaagaagcagagggtcatgaactagccaaattcttttcctggctgtaattctcaatctctggtcttatcatttcccattcctctttgctgttaattgcctctccccaccaaattccaagaatattgtttagtccccttcataatgattctttttgtaacagactccttaactcttaggaacatgctggaagggagatggtaacagagaggtttggctccctgggccccattctgactgtccatatctgaatggatatcaacttaaccttgcccaaaaatctgtgaacaggtatatgtggggaaaaatacataagaagttaatttccatgacagtaatcaacctcaatagatttcttaaatataccctccccttttttttgacagaatttctctgcatagccctggctgtcctggactcactctgtagaccaaggtggctttgaatttacagggatccacttgcccctgcctcccaagggctggggttaaatatcctttttatgtatattggaacctgcttggccatcgtatccttaaagttgcttctgtttcactattattaacggtaagtgccagcagggaccatgcccatgtgttcacaatctgaaagcatcaagcatctttgatacctttcctttgtccttaagaaattattcaggaaaagaaaaaacactaaaaacaagatgaatttattaggttatgtggcctagttttattactaagcaacaagatccttaacagttatgaggccttgatttttttctatctataaaatagcatcccagtttgggtttctattgttgtgataaacatggtgaataaaagcaacttggggaggaaagtgatgttttatcttatactttcaggtaataatctaacacagagtgaggccagggcaggaactcaagcggggcaggaacttgtagacagaaactgatgcagtcaaaccaggggtgctgattcctggcattctcatgtgacttacccagcctgctttctcatacaatccaggaccacctgcctaggagtggcactgtatagtagctgggccctatcagacacacctatagaccactattacagaggcattttttttttcaattaagattccctcttcccagatatgtctaggtttgagtcaagttgataaaaaaaaagaacagtacaatgggcttatcaacaagtattccttgaaaaatatttgatatattatagccaaatgtacaggtttcaaatgtatggaaaattatgacagcttgtctgtgctcggttgctaccttatagcaaggattcagaaaccagacaggacagctctggtcttaggaatctgtaatctagttagcgggtggcggaactgcagctctgtttcaagatgaaagcaactgaactgggtaacagaatcaagcatctaggagccaagcctgcaaaggctgctgaccaagaccggccctgctgtgggatgaactttgagcagagatgcggaagataaaaaggaaacagtcaatgcactagagtgggggtggaaaacagaaaagaatgttccagacagaaaaagagccaacctcagagactcagagacacatgacaacaaaaactagggtgttcaaaaccagaaagctggtgaatgttggcctgaggacggtgagccagagaaagaaagggcaatgctatttgcattctgaggcattgaaaacttactccaactttaagaccatggattgcactgatgtaatatgatctaagtttaagatagaccatggaaggcaaatatggacagcaggactcagggagagagcacagagatccagtaaggctgtgacagcctggcctggcctcccagcttcaaaactttggagacgaactttagtgccagagacagggctggcaatggcttgtgagagtttcctgggataacaggatacatgtgtgacatgtttatatccccataaaataaacacaataaagaagaaacaccagaaacgactgcagccctgttaaccgtgccttcagatttgaagacatctgcttcctttcccttctatgcttccggtgtccgatggtttctatcagattttcctttcagtttgcatttaccagcccacttagagaggacttccttcttcctttatgaaagtctcacttcttggtttttggacaattatcattttgggctgtacagtgcctaagcacccacttttggtggcaccttcttttggcagcaggaggggaattccaaaaaaggtagctgtctcaggtctcttcctatgatagaagcccaagactagcacactgctattcaatcagtggcagttttattttgttttgttggagacagggtctcattgtgtagccatggctagcctagaattcattatgttgacgaggatgggcttggactcacagagatccactggaatcttaatggcatgtgccagcgggtttgggaaactagcactagaagtaaatagcactatgtgacaggagctaaacatcataaaaataatgactcattctgttgaattattcataataccatccacctagagtgtttgctgttcccatttaatggatgaggaaattagattaattcaaggatgcaaacagttcatcagtaaaggaacctagatgttgaacccagcaaggctgactccaaaaacatatcctaatcatcaagcctacccctagcaacctagtggttgggtccaatcatagcctgtagctttgaaaagtgatacatggatgcagcaatggtcaccggtgatgtgcagaactgccaaaaagctacaggtcttgtgtagagtacctggctgttagtggcaggccggcctgatggcagggcccactatgtcaagcctttcttagagccttcctttctgctgattctgctctccaattttcattaactcccagctttctactttcctcgtactatattattcttctgctgaaacgatctgcaactaagagccctggccagcacagttcatttacacaccagcaggcagccagccactatactgaaggtaagggcgccagcctttgcatcttcttcttccctcagagtcctcggattccacagcaagcttccttcctctgacagtgtgcacagtcaagctacctagctcataggaagccctactttggaccatacacactggcaacagccatgtgtcaaaactaagggttccagagggcaccctgccagaggtgccccttgtgccttcaactcccacagggcaaggaagtaaacccagaggactctgccactcaggaaggatggtggtggcagagaaaggccatccacaccaagcatcctggccagtgccctttgccaatcttcatgcttcaaatctgggttcagttctgagaggttgaattccagtctcatctttggagcgtggtgtctttgctacagaggtcttggaatccatcttccctgctttcctacccccctgcatgtcacagaggggaattcttataatagctttcctttgtgattcaaaaggtaacaggggcacagataaggcaaactattatatagattaggaggcatccttgaaaactagggtctttctcgtgtgtgtgtgtgtgtgtgtgtgtgtgtgtgtgtgtgtgtgtgtgtgatatagtacaggtagtgcacacaaggatattggaaggtaacagcagctattgaccttcaccttacaccatgcctgaggcagcctcttgttcactgcagcatatgccaggctattcggcctcaaggcttttacagactctcctgtcactgccatcctgcaggagcactgggattgcagacacatgaactgtcatggcctcctttactaggtctgcagattcaaactcaggtcctcatgcttgcacaccaagagtttctcccactgagccttctctccagccaggaaagtatattttaaggtagagggttgaaaaataagataatttttgtggctttttgcaactccactggtggtccttcctattttgtatctactcacagtttaagactcatgaaagtttcaaaaatttcatctcctagtggcatggcttaaaaactttactcttcaggattttggtattagacatgattatttttgtctcaagtccttaagcatctgaaaataaggtgaggttttctataggagtaatcaaggtccttttggaagtggcaagtggctaacagaatgggcatgagttgaacttggaagatcttgttgtgccaggaagaacagaaccaagaaaataatgttggcatgtgaccatgccacaaaaggccagcttggaagggatctcattgcacaaatcttgtacacctgagaaccaaatgatcccacattataataaataaatgaaggaagacagaagtaagtaaaaagaggtaatgggaagtctctttagcagcatgccaagtgcccacccgtgaacaatgagagactcctggagatgggagataattttacaggcattaaataatagaattgatcagctaagaataaaaaagtgataagtaaattgagaatatttttggtttgagcatgttgcttaacgtgcaaggcctggaaaagaatgtttactaagaaggacattttgagaaggaacagagtgattcaagaggttagattagcaccatcttgaccaggtagtcaaagttaaaggcatcaatgagaagcaaatagcctccttgtaactcagatgtaagttcctctgaaaggtgttctagccatgaatggctagctggactatagtcataagagaatcagataaagcctgaataagggatgcttggtttgaagaagggcaagaggggtgtgttcttcaaaactccaatgtcatgagagacttaaaatgttctagttaaagaaacaaaaaggcatgagaatcaaatgtgatatctaagctgacactgggctttgggcttggaataaggcaatgcctcttgggacattgctgggctgactcacaaatcaaggatacaagaaacagactagacacaaatatcctgccatggttaaacttactaaagtttcacaaatgaactgtgctcatgtaagatttgtcctgatttaggaagaatggatagatgaagttagaggtaaggctacagtgcatttaacacattctctccgaaaagtggagaaaatgcacaaataagaacaaaaagaggtacaagttatatagcaagtgaattaggaaagtaatctacccaaatagtttgtaaattcattgtgtgtgtgtgtgtgtgtgtgtgtgtgtgtgtacacatgctggtgcaggtgcatgcacatacagaccctggagaaatgtcaaatatcttactctagcaatctttgctttatttttgagacagggtcccccagttgacctggcccactcttttggctaggctgacaggctaatgagctgtcaggatccatctgtctttgtcccacagtactgaggttatgtgcacaggtaaccatgcctagcttctatgtgggtactcgagatctgaactcaggtcttcttgcttacccagtaagacatctccttcggccccttgaattcttacattgtgtctttcagacattgaaaaatgtttccatataaaaagtaaaaaataaatgatttgggggcggagaataactacaaaggggcaagggaaacgtttagggatggagaaaatgttttagattatgtttatgcctgtgtttatacaattctcatgtttgccatctgtacatctagacttggtaggttttatttttttcaacttttttatttgaattagaaacaggattgttttacgtgacaatcccagttcccttcaccctcccctaccacccccctccaactaaaaccctatctatcacatatcctttctgctccccctggtgaggccttccatagggggtcatcagagtctatcataccctttgggatagggcctaggcccacccctgtgtttcttcgctcagagagtattcctctatatgaaatgggctcccaaagtccacacctatgctagggataagtactgaactactacagcagaaatcccgtagatttctgaggtttcctcacagaaacccatgttcctggggtctggatcagtgccatgctggtatcccagctatcagtctgggaaacaagagttccccgatgttcaggtcagctgtttctgtgggtttcaccagcctggtctggacccctttgctcttcactcgtccttctctgcatctgggttccagttcagttcagtgataagttgtgggtgtggttgagtcaggggaagaatagatgataacaagaatggagataccataatagagggagacatttttggtttacagagaaacaggcactagggaaatgtctggggatctacaaagatgacaccagctaacaatctaagcaacagaggagaggctatatcaaatgccctccccaataatgagattgatgactaacttatatgccatcctatagccttcatccagcagctggtgaagtagaagcagacttggtagtttttactgcatgtaaaatacctcaaaagagtttgcttgaaaagtacagtgtgaaaagtcaaaaggctgtcctggacagacagaaggaagatgggtacctgcctttgccccttaagacgtctttagggactgatatgctatggatggaagtgggtcgtctatctggtgggtgaggctcatttattgcaggtacagagagaaccacactatcttttgaagcatattttgacctaaaactactaatcatcttcctattaacatctattttatagtgagcacaacactctgatgaagacttaaagcataaaagctcaatgaaatcctgcccaaagggtcatgcatattatcccagatcctgagaatgccatccactgtccacaccaatttccgttgatagtttgtgctctctccctggcttgtggaccagccaagacttagcttgtgaacagcctgtcacaaccattctatggtccatgcatcatgaagcccctccagagtaacctctgctctttcctactctgcttttgtgacattaggcttttgtgacaatcttcccatgcagttccttgagaaaaggttccttgtactgagtgccaggcctggtactctggagaaatctgccagactaagcttaaaattaggaaatgaggggatgcttgctgtcatgtttcttttctttttcagaaaactatcacctctacagagaaagcaccatgcagcattgtctctagtgctctcctacccagaaacaccacacttagttttaaggggagattttgttttatctgatccaataaaacctgtttggatccagactttctattaattagtataattagggaaaatgaccaaaatcaatttacagtctaggaaacactgaaagaaatgaaaagcaaagtgtccctgttaaaatactacttggaaattttaaacaaaccactatgcaaccagtaactggtcagctgaaatgggagatgtcacctccctgatgcctaaaaaaataccaaaagatggatcaacaagcgatcactgtacccagtgtgccagacagagattaaaggtcacattcacaggcaagaaatggcagagccacggtttggaagccgctgtctagactacattttcagctcctacaatgttaccagggcaagacagaaagacatggagacttcgaggacacaggatagaaagaagcctctcaccccatgatctagtttttgtttctactggccaagattcaaggccatcaacacaactgataacatcagaatttcctacagagatagtgctagccttcctaatgacatctccagcaaagatgttagaacaacaggccatgcttacttagggctggggccagaatgttcaggcccaggccgcacatcttagctgtatcacgactcctctctcttccctaaacccaaacaataaaccttataaaaccaccctcattaacaaaaagaatttttcttaatttgtaaatgtaatttaatttaattttaaaacagggactctgtagcccatccaacttactacagagtctccaatattgattcttctgcttccatctcccacatgggattttaattgtaagccaccttttccacagttaggaaatcctttaagcaaggagaaataaaccaacatacatttttctacttcattttaaaatgtggcttaaaccttgtaaattgcccatgtttgagttgtacagtgtcctttttttttttttttttaagacctgttgtggtgttattgttaatttgacaggatctgggacatctttgaggaattatgtataggtcactgcacgaagctgactgagcacagttggctgtcactctgcgtgaaactgactgagcacaggtgatcatcactctacatgaagctgagcacaggtggtcaccactctccatggagctgagcacaggcggccatcactctccatggagctgagcacaggtggtcatcactctacatggagctgagcacaggtggtcatcactctacatggagctgagcacaggtggccatcactctgcatggagctgagcacaggtggtcaccactctacatggagctgagcacaggcggccttcactctacatggagctgatggaccgtggatgcaatgtgaccagctcctcatgctcctgtcactggaatttgcccaccacaatggaaccatgagccaaatgaacccttcctttctgacattgctgttgtcagaacattttatcacagtaataacaagtgactgtgacctcctcttccttttgaacttcggtctgaagcatgtattatcccatgtctctacttaataaactcattaacttagcttcactctgacttgtcctgaaatgctgttctgtgctgtacctgagcgaagagggctaggaagggaattcacgggcagtggcagcagcaatagggtgtatcttcccacctcatgtggatattgtgggctgaattataccctcctgtcaacatttatttgtttaagtctcaaccaccaatacgttagagaataactgtacctggaaataaggtctttaaaaagatgactcatataaaacaaggcctttaaagtccaatctacaaggactagactccctgtgggaggaagagaaaacaccaggaatgaacatgcctggctgaaaggccacgggaggacatggcaaggctcctatctacaagccaaagtgaaaagcctcaagattaaacaaacctgcctgcaccttgacctgtggacctggaagaaaatcaattcccattgcctaagcctcccaagatgtagtacttcatcatggtggccctaccagaagaattgatttaagttaagtaccacatccccttccttccagaaagttccaagatgaagtctatgttcaagtttagcagtcagggtgactggaaacactcaactcagtttctaagcaacccttcaccaagcctcacagaattctaacatcaaatgaagaccattctttcatttaattgctattgtctagaaacaaagtttttggtactggcaatactacctatcaatggtggtgtttggttgctttactttttctcagaaatttgctgccatgcaattcatgttcattctacaaagattaaaaaacatagagctgaaaactctgtcatcattttagctggttttatataattagtttctgtcaacttgaccaggcaagagtcatttgagaggaaagagcttcagttgagaaaaatgcctgcataagatcaggctgtacataagcctgtaaggcattttcttaattagtgattgacagggaagggccaggacctttacaggtggttccatccctgatctggtggtcctgggttctataagaaggctggctgagcaagccagtaaacaacaccctccatggcctctgcatctgcctctgcctccaggttcctgccctgttcctatcctgacttccttcaatgctgagcagtaatatggaaatgtaagacaaataaatcctttcctttccttcccaaattgctttggtcatggtatttcaccaaagcaatagtaaccctataagacgatcatttatgcagagagccattgtcttgggatctgcctcccatgtacatgaagtgtagatgttttgtttgggtgaaatggagtgatcacgtcatgcctatagactcctcacgtccatgtggtgttaaagcaggaacaaactcctggtcaaaagaatagaattgccagcctgaagggagacctaatatttcaattgggttgggtaattcatgtggccaaggtaattcatgtgctcctaagaaagcaggctcaccttcagccacactacagagatgggtgggataattagccctttgatgagatgccaccttcttcccagaatccctgtgccgcttgtaagtcagttcacttgttctgattactcaggaaagcataacttgccttttctttctcttttgaagcatgttctcctcaactgtttgagcttcttttctcaatattgtgggttcatttactgtgtccagagcagctgttctcaacttggggtttgccaccgctttgggtcagacagccctttcacaggggtcgcctaagaccattagaagacacggagatttacattacgattcataacaacagcaaaattacagttacaaagtagcaacaaaagtaattttatggttggagggtcaccacaagatgagcaactgtattcaagggtcacagcattaggaaggttgagaaccactgctctagaacctccccctcccaccctgtggtggtttgtctgcctgtgtctgacctccatgtcagctgaaacacaactggctgcttcccctatttcctccattctcctctgggcagctgctaaggttttataatttgtctatcctggttttcctttccctctctaccctttccctccctcgtcctctccttctttaaactaaataaactcatccctgagcttgtttgagttcttttcttccccctgagacagggtttctctgtatagccctggctgtcctggaactctctctacagaccaggctgacctcgatccccagaaatccccctgacactgcctcctgagtgctgggattaaagacatgtgtcactaccacccaactttgagtccattcttaaagaggggagcccccatttcccctggctcagcgttgtccagccagatgctcagcgtgtgccctgtcagagatgagcactctgggactaaggcagcaggtactagccagctgctgtgtgctgttctgcccatgcatgtatattcatctcacagaacacattcttgcagtgattgcaagaagtcccagaaatgcttactcagtctgcctacatgtcctttgctgttcctgaaatgctgcaactgccccatagccctaggcttcagtcccagcttcaggaagcaggaggctggcctgtgggctggtctccaaagtgagaacctcaagggaggccctcagttccccaggaggagcatgttagaaggtggccacaggccattatcagactgtaatcacatgaacacaagtcccagaaaccttggcacacagaagaacatggcaatgggaagccctgtaagctaccccctgtaagccatgctaggctatggctcagctgaccagcttttgcacagaccctcactgcaaggcaaacatcttctctaggtgagagcatttcttctcagtaaggcagctctgctgtctcacttgacagctaacatggcctgtgataaagggaacttgggatctgtgtccaggcctctgtagtcacaatcacccacttccattcaccaagtgccttaaaatccacactgtctgttaaccaccccatcttctattcccaggccactgcttctgccactgcccagcaccctctccaagagtggactatgaggatggggcctgaccatgtggctcaccctataggcagctggggaaccatcctgggtgtcgaatcatcccagatgtagagtggaatatgggtcagcataagcagtgaggcctaggagtgctgtcttcacatttcacatcctgagaacaagctctgtcaacacacctaatatttaacatgagtctatattgccatcccaccaggaagctacaagccagacctgttctgtctccagttaggatcatttcacaggatcataagagtgagtgtatggcaggaaacagcctgagtgtagagcaagccagagccactagacagtgcatcctggctgaaggcagattgtgtaagaagcaaggggtaaaggaaatggggcaaacagaggcctgtcaagctccttggtacccttggtgacccagggcagtggagtggccccccagctggggacaatcctcacagggctgctgaagtaacaatgatagtgatgacctgtgaaggagcttgaccaggctactgggaccaggatcccagaggtaggtagaaaggggtgttgaggtctcaaagatagagccccttgacagcaccctacttttactctgaggattcctacatcagcaaaccaccccaactctgcccagtgcagggtccaagctaggggcagcaaagtaggaaagccagttgtgaagagtcacagaagtgaagtcacagaagggtgtcaagccacagaggccacagtccataaagaacatatttgtttctaactgtggttctcctcttcccctaggtttaaagcctcaagactagcaaaggtgccactcagcctcagtatgggattcaaggctactgcatctctacctacaagggcatcccctggagctcacagcccaggatgccctggtcagagctggtggctgcttcccagtggcagctgatggagcagcagggagctagctgtgtagcaggtcctggtcctttctttcttaaggaactgctgctgctatctctggactgagttcattgagctctactgacctgggctgatgagtcaaccctgtctgcagccacagctttcatggaagtcttggtttcttcttaggcaaaatggcctgtggctgtgcatctgtctttaagaacaccacactcctttggtccagccccagcctctgcatcaaggcagtgggaggtttcatctgtggtctggcaaggatgtcagtacggaggaatgtccattcctttcccattccaaccacaggggcccgaagaatggtgagctcccaggcacatggctcagaggcacaagtccaagctatacctccccactggtgaacagaacacatgatgccatcactttccaccagtgttattagaactatttgcttttgcccaattagaaggacttactactaaattcaactttaccctttattgtcttcatttcttcctgttgaaaaatcattccaccagcatcttgcagccaccagctgtaaccagacaacttgtgtccctcaattctgtatagtgacttggacttttactgagcccaatcaggactctgctcctccacagtacacttcagaaacacccttaccacccccggctgcagacacattcatcattgtgagagcctgtggcttctcagagcatactccacacaggatcccaaagtcccatatatgaagtggggctttcaggtctgagacacgtgaccagtgaatgatctaatccagacactgtagaaactcgggtgacgtttccacttcaagtgatttcagacaggatagcacatacccttccctgactgcccaatcttttgactcacagccagttcctttagcttgagacttggtctatgccataaccctctaaagacagaaagaacttgggtttttaagcccacccttaaggctctggtagctccatgggatttggagctgtaccttgaacgggaaatttgccaccataatgattgagagaaggggtcaggagaagtagaaaagggctagaacagcctgagggttttgttacatggattaaatgggacttttaaggcagatgacagacatccccttgaacattccttctctactttgtgtgtctaagtgtatcaaataggcctattagcaatacagtatggctcagcttacagcataatttgcctaacaaggagccagcatatgtccagctcttggtatagtcttaatagtacttcacacattgacacgaatctaaatatttcaaagtgaactagagtttagtctacccttgacaagaaaaagcatgcatataaagttgaaggaaggcataattaattaccttagtattaatcaaaccacaaactgtgacacagtactccacttgacaaacaatgcttgatgacagcctgtaggtttcagctagagttcccaggctcagcctaattctggatgagcatctctggccccagggggtatacagagttccttcccacccaccccccataatctgcccccttaggaacttcttaggtatacctgtgggccccaggccacaggcctgagttccttcccagcctcagcaaacagcctccctttgggcatccctctggggtcaggtctctcctcctccccggagaagaccctaatggtaagctaagagtcctttagacagggaatttcctctggcggtagaggagaggcaggtgtgggaaatctggtggtcaaccctttgaacttaagggtctgaggaaaaccaggggatatgccctttaaacccaggagtacagaccaggcaggccctttaaacccgggagtacagaccagggaagtcctttaaacccaggagtaggggttacatagtagagggtgttcttgcccaggtgtgaaggcagaactgactaaaaggcctctccaggtcaatctgtctttcttttgtcgttcttgaaaagtgactacttgaagatagttaagcacagtaagagatggaggaaacaagttgaaatgcttacagctgtttagggaaaaaaaatgggacaaaagccagtattcaccagtggatggactgacggacattatagacaagaagagacagatgcttgccttggggaatgaatcgcgccttaaactcttcgtttttgcaacatttctacagagaccttcgaaaagtcgcggaggcactgatagaggtaccaagttgaacaagggtcggccaagggagggttaagcctgctctctcccgtggcctctaggaggtcaccggcagaagtcattgcagtctcaagagagaacagcaagcagtaggggcttcacttccgtggctcggttttctctttcctcaagtttgtcggttgctagagttttctttgtcagttcttactgtgaggacagagccttcctacacgacctcacctggcaggtaaaatctgggctgcaggtagcacctgcaatcagaacccaaggagagcagaacctaaaccgcatgccaggcggttccccaaactcaggttggggtgctacagcaaccacccgtgctgctgggagctcacaggcgaacgggacagtgcgagggggaaaacagacaagagcccaaggactgaagcccagccctgctcggagatgtggggagtctggggtcgaaagtcacccagccccaggtgaaaaagacccgcgcctaattaagcccggaggtggcagcatctgtgagccgcggagggagggagggaaaggacagcaccccaccggccttgctcgagtccccgggacgcgaacatcggagctgcccgccggataaacgcagccactcacccagcaacagcagcttgagctcacggcgcgcgtccttcttgtcgcggcgaagctgccgttcgatctccgcgctgatgcgctgcgactctttctcctccgcagacagacagcagcaaccagccatggtttgccactccgacggggcgacagggaccccgcgtttaccgccgggccgcgcggataatccgcgccaggcgaagggtttggagaggaaacagctgaacctactacggttagaagtaacaggcccggagctcctggctttttaacctttttcgaaggcagttccgccggagcgctcgttcggtcccggatcaggcgcccagccctgcgctcctgcggaagagaaagagcgagctgggctgtgtgagccgcgctgtctccagaagatgcgcggcctcccggagagtgtagctgggcagccaggtaggcagtgcagaccgcaaatcagaagttggggctcggtgccgttgggagaatagtttctccgggtctgggagtgtcgcaggctagcagcaggcgtggcgtggcttgcaggcaacggaccaactagcctctgcctgcaaagttccgaaaacctctgcagttacggtagactctggccgaagggaaggttcgaccagcactgatggctctaagtggtaggaggaggcggggcgtctcgaacctacagccctggagtctgcgggagttgcccctaggcctaccccaagactatggtgcctggggacaaaggagaaggacgaagaggctagagcgcggagcaacctcacacctgcctctttggcggtggcgccctagtgcaggcagggccacttgccaagcttgctgtaaccagcaggcgctggctgccaggcccttcccgctgccagatccgggttctgacaggtgagggagtttcgcttactcccagcctcagtgccaggggtggaggcagcgcattagcagactggagccaggcgtctgcagccaggacacacactggtattagcagctaggctctggcctccgctcccatctgaggctgagccttgctcaccagcctctccaccgctcacacttggggttcctcgaccagctccctccgcttcccggatgccccagtccaacctgggcttggcgcaaaccctgatttagcttgaagcttgcctgtctagtgcagaccggccgggtggctctgctaggaaccgcagccgcctctggggtcccgtaaaagagcagagagcgagttaatgcctcccagcccgtcccacctccaggcaccagatggggggccggggactggaggggtgagggtgaaaaaacgtctggctgctttgcatttggtgatgaaaaagactcctgctttgtagaaagagttggcaccttccggacacacctggtagttccctgctcagccctgaggccagactgccgccttaggacaactcctggaacaccgccagtaaaatctcgcaccctcgactgctcaaaaggaaagacacaaagcaaattaccctcgatgatttttgtctgtgcagattttaaggtgcaaagcgagagcagaagggatcctgcggaccacagcaaaggatcttttctttctattcaagtccgcacaggacgtgtgcacacttaaggaatccaacactactgtctgtaaagagcaattaactcaggagtggggcaccgtggtcattatataagaacttggcagctaatgttatctggctgcaaagtcttgtttactttacagtttaagaagtgcaggttaatcaggctttaaaatactctagtatttcggtttccttccaggcataaattgacaacaacagtgacctctgcaggaacacttctggatttttcttcagctgtcacccatttttcctttggctcctgttttacaccaccaagaatgacaccgcttgactcctcaaactaaagcttcaatcacaatttttagtcgttcatagatactgagtgcaaaccaaatctgaatgccaagttaattgaaataactgatagtcagtctcaaattaccagccatcaaaaacagatcatggcaaactgtcctgagtgaacttggtggaacctaccaaaagccctcagtatttccatctactttgataaaacttgcaatcttccggcaggatgtgaccccggagccccaaagttttgtaggcaaagtttttttttttatcttcagataacaataaaaattcaatgatggagatgttaacaacagggaataggccaaattacacatgtcttgtctacatagggtgatatcatgtagccattaaggtatctatgaggaacattatgtcacaatgagtaacaacaccctgtgatgttttggtgagtgatggtcccatgtgtcatgatggtcccaccatctccctcagggctggggatgtagctcagtggtaacccacttgcctcctatgcatttaacatccagcactgaaaagaaaaactacatcaccaaatagtataactgtcctagctcatataagaacactcagcagtacccttgcattaatgaaggtgattagtcacgtatcccttaaactgtattcctatcattcgtgcaatactacataagaataacaaactgagacaaatcctcaaaatacattcagcagaaaagacgaggcatacatacataagcagtaaaatataaatggtatggtgagaatatacacctgcatttctaagagcctaaagtacatatactagaaaggttagttgctctgagtcaaaaccagctggctgattatctaacacaagtatctctaattaactgacagttacctgtggccccttccatcatatttagattgtactttccttaactgtaaacagagcaaccaactacaattcattcaaaggactcacccaactccaactttcaattgtttccttgataattttcacacttagaaagagacattaatggactggagaggtggctcagcagttaagtgtattggctgctcttctagaggaccctggttcgagtcccagcacccacgtggcggctcaaaactccagttccagggaatccaacaccctctttttgcttctgcaagcaaaatgtggttcacagacatatatgtaggcaaaacattcatacatataaaattaaaaattaaaaactaattttaaaaagatggtaaaataaatgtaaaattattgggcatcataagctcccaagaattgtacaacaggataacacaacacaattagtttcccatttctgtatttgactctcttttccttatctgtaagatctagggcataaaatcagaatacttttatatcatagtatttgaagcatctttccagggaaggctagctctgaagaaagggtttactaactgagaatacttttcctagccatcctcagtctgttacagttccacctgactcctcatggactccagctggactgcttctgcctgccaagtgctgggctctttaggtcagataactgcaagtcaagcccctgcaatcctgtttcccaggaaaagccattactctgtgacagtgtctcccttgtctgccatgctaatggaatctcagacaaatgtactgttgtcttctacaggccttggtgcaccctgtccccttttccaggaatgccatctcttacctcaggcaaagttaagtcctttcttttccaagcacatcccttctgagaagccatatccactcctccattagaaccaaggcctagagctgcccatgctcatcccatcctaccctagtgtgcctatttctactaattcctgttactcacaggtagtttttttttgtttagcttgctagtcttatactagcaaatcttagtttactgcataaaactgaaaccaagaaaaaatatcatctaagaagagagaaaggaaggctctcatggtagaagatgacaacgatgatgatatgaagatggaagagaatgtcaaccagaaatgagcacttgatttaggaagagcctgaacgtgtttgctggccactcttcagttatacccttaggagagaatgactgccctgattctaatgcagagctgcaagggtaggtagatcagagggctggaaagatgatcctctctttgggacatatattattttaggatttaagaagttctgtgtgattcagctctactgtttctagggatatgcctggggcacgctgttactgtgacagaaactgcacattggtgttcactgctgcactagtcacaatagccaggtcacagaatccagacagtgacacagaaatagcacatttgctcttgtttgtgagtcctagaatttgacatgtgtagtgagagatcttactatgtacctgtggtgtggtcacaggtgtgtacgtgagagggtgggattttggtctggggtaagggacaggcttgctctctctgggttccaatcgggtctcggagggcagctgagattggatgcttggagtgctgatcctgggttatcggtttctcatgtgatttctccccaataaaattaacctacatcatcccaatcccatgtatcgtaatttgtatagccacagacgtgaatacctaaatacacagagacagagacaaaaagacagaagggggagaggataagaggaaggagagaggtgaggggattggaatagggggacagaacatgagagaggtacatgtgaacacagtacatgatgtatttggggggaaagtgtcttgatgaaatgcaacattatgtatgatgaatatatgttaacaaatacattttgagttaaagaaaaaagagaatttagaagaaagagcataaaaaagcagcccagtagaagtgtgcagagctaatggtgttcggcatctttgtgtcagttttcaagctgggaatgaccattatccctttaaaggaaaaagagttaaagtgtaaacagacactagtgaagtacctgtcaactacatcctgccctggaaccccaggagagtgtacctgtatgtgattatcataaaggtggcttgagtgtgtgtgtgtgtgtgtgtgtgtgtgtgtgtgtgtgtgtgagagagagagagagagagagagagagagagagagagagagagagagagagagagcagcctctaagcagtgagtgtccatggggcttgctcatccacagcccacatggctgagaataactcttgattttccaattcatttttctgggtctgatgtgtttccagtttttcattcagtccgttgtgttctccaaagcggcttgagtctcctccttactctgtggtccactctatgatcagctgcagatcagcagatgaaaacagatggggcattggtggccttatggatgaggcaataataacacactgctacacacagcacctgtttttctatggcaatcagcatgtcaacgttttgctccaaaataccctctgttggaagcccagaaactgtttattaaataactttaactgggatggctagaacaatgggcacaaaaatctgtcatccaacacatatgaccgtgagtagacaggcagggctatcatttagtgtttgaatctgagttttcatgagttgaggatctcaagaacttaagaaatagaaatctttaagaagacaatccggagatttttattttgcttattttcttttcaattttgctcaagtttcacattcattaccactcttctcctggttgtcaacaaacattgacaacctagtatatatgtacccttctctatacctttgtgcccttaaagtcatagacaaagcatgaatatgaacatacacagagaagcgttgtcaccactaatggcaatatgttatctcttttcttcctcctcattcaggaataccttgtttgtagcttcgctgtattccacgctgtgaagacggtatccatcattcagcctgtcctccttaaacatctttacttttgttcagttttggccaatgaaacattctgtagccatatctctgtttatggatcttcatgcactactgtttttataggttaaattcccagaaaaaggttgctatgttatatatacgtgtgtgtataattttatgtgtgtgactacatataattttatacatatgtatatatgtatagacattcattttttattttaataggtgtggccagattccttccaaaaaatctttaatattctcatctgctggcaataatatcagctcccatctcctacttctctgccagcgataaatactgttactcattaacttttggcagcttgaagggaataaagtgatgttaaagagctgtttcctttgcttcctgtgcttgcccttatctgcctccttgtgacttgcccattcatgccctttgctcatttttaaaaattgggtcatttgtcttctccttgacaacctacaaactcttcaataaatgcatgttggctctttgtcacccaagtgacaaatatggcaaatatggtatttgcctccttcccctacttttttattttaattgtttgtctgttcatttttgagactctgtaacttattatgtagaccaagctggccctgaactcacagagattcacacccatctcctacatcactagccatcaatacatattcttgtgcactggtgtttatttttgtggaatgtgagaaatagaagatgagttttgtttgtttctagctggataccaggcttcgctaactaacataccatttcactgagctacaagctcagttctctgtcaataccatcgtggtctgattgtaaaggatttcaaatgttctgccatctgagagacagaccctctcagtgtcgtcactctcttcctgctgtatattgacttatttttccatatagacagtcatgtatcaatgtcactccctcaacttcaccctaacattgacctcaacttccctgccttctggacacatctattggatttccaatagacatctgagaccaaattctgaatttattaaccaagtctcccctttctgccacctttcccatctcagcaccaccagacatagctctccgccaacctacccttagcagttctggtctctttctttagttgtatcctaacatgttagaacccttccagcaccagctccaagatgtcttgcactttacatttttgttacagggggtttctgaattaaccttagactgtcgcacgtggctgccaaggtatagtctttcctatttttgttgccaccaggtctaaataagctaccaccatctctacctagactaaaataacagttttatgactggacttctgtttcactccttgactataaaatccatccatcgtgagacaaacaggatagtcagaatgcacaccctttagttcctacgttcaaattcttctatgaatttccttcagaaaataaaatctttctctagaccatgaagcccatgcagcagagtcattgcctgcctctaccacggatgctaacagtcaccatactgagtgttcttgacccgcaccatgccttacctctctggacagctgctgacctgcagcagctgctctgctgttggtatcaggcctcctccagaccgtgaaacagtttgtctatgcttgtcaatgcatctcaacaccaatgggattcactaagcatgggcttccctgacaacttggcttgacatggcctaccttaccacccatgcctgtttgatactattgttgaagccctgtatttacagtagggtatttagcacttccttcttccatcagaaaaagaaggtagtctccacaagaggcaagatgatggtctgcttatttgaggttagggcagccacctcatcttaaaattgtatcttcaaagtttccagacccccttctcagtgaaaagcttggaaaaaccagtagcatccattccaacattgtggttggaatctgaaagtgtgtcctccatattctcaggttttagcacttgccctcaggtagtggcaatattttgggaggcttatggacctttaggcagtggggcctagatggcagaaggaggtcaatagagtgggccattgaaggtacaagttgaccacactcccaccaccataaaatccatcacaacatcttggtcatgtctgagacattctttaactataagcacaaataagtctttcctcccttatgtggtatatgtgaggtgttttggtatagagacatggaagtaataacacatatagtattttatgattttgtgtttgtctattgcatacttcatttcttatatatttagaaaatcacaccaccaatgactctgatctatggatacaggtcctgttgatagcaagaaatagaagctagatataaattggcttcagctaaaagtactatttattggaccttgggatagtcttgatttgaagctctgttggatccaggctcttgagtgatgttacaaagaggacatctactggttaataagcatttgttgaatgaaacaataattcccatcacatttgattcttctgaagatttgcaaaggtaccatgtctaagttgttagccctaagcctacagctagaaagcacttgacaagagatgagaattattgttctgtgatggttaaatttggctgttgatttgattggatctgggatcaactagaaaataaactgctacaagagagtttcatgatcaggttacttggaatggcaggactacattaaatatggccagtatcttctgacagcagcccagatggaaaaagagatttgaggaaaaaagctttctttgccttttgttttcttgctttcatgacttgctggcacattcatctactcttctagtgaattcattctgtttgctcctgctgctgctgctgctatcactgctaccatcactgacatattcttacctaacttagagtcacagtggatgcccccaagaagttaggattgaccactcatcctctataaatcaattaaaattggaaagcaaaggtgggtgtgatattgcaggtctttcattccagtacttggagacaggagtgggtggatctctgtgagtttgaggctagcctggtctacatagtgagttccagatggccgtggctatatagagtgaccctgtctcaaatatagacaaacaaataaataacaaaaagtggaaagcagaaaaagaagattcattcaatgtggccacattgggaagaggaacaacaagacacaaagaacagtctcctcccccagtgcttcaagctcctgaagtatgatcaaagttttaatgaagggccaaggatatgcatatctcagcagtcccaatcaaggtcttgcccactgttgactcaccattgtctgggctatctcatctctaaggtggtctgacaagatgttagaactacatgaaaccccttcccaggagacaattgcccttccagctggtaccttacttctcccagtatgagattcctggggaaattcccatttctatggaatacacagtgtctctttataatgtcatcattttgctaggcttgctacaagaggaagggataattcatcctgcatgctcctttggagtgattccagcatctggcagcaacagcagatagagatagtgctttcacttcctagcaaggacagagcagggacagagacctaccctgacctgtctggccaatatcagaatgtaaccattgagtccctctgaaagtaaacatgcattttaaatgtctgagtcagatatgcagattctgtgaatgaagcatgcatcctacaacatgctctgctttcctaaatttaatatgcattcaataatttcctccgccatttaaaagtctgtgaagctggcaagtactagttggagatttattgctgtaacattaacgtgaagctgtcttctgtctttgtaggtgtctgagacacatcttgaagactcatgggctcctctgcccttttctgacatcactcggagactagaaatagccagaagttcttgggcattgtcttagttagggtttctattgctgtgaagagacactgtaaccatagcaactcttataaaggaaaacatttaattgggactgacttacagtttcagaagtttaatccattatcatcatggttggaagcaaggcagcaggcagatagacatggtgctggagaaggagctgagaattctagattttgattcacaggcaacaggaagtgaattatcctccacactgaatacagcttgaacatatgagacctcaaaccttcccctacagtgacacacttcctccaacaaggctacacctactccaacaaggccacacctcttaatactattccctctaggccaagcattcaaacacatgactctatgggggccatacctattgaaaccacaggctttcctccctttgggagatgagacatgcatcctctcttcaggtttcatggctgtttgggatgagaaacttccagttcctatctcctgaatgtcatgaggcctcttcaacttttttgcatgggctctgagctcttatctgaagcagttctcttccaccgtagtgacaagatgtcactggaaaccccatgcgtattcatgtctgctgacagctccagtgaaaagagcacttccttttccccagttgagcaaatgctaagactgactctgtatgacaacgcatccattgccctgcctgaaccgacatgtgatggctaaagcaacagaatacttaagggaccagccctggttaactctagttatacagcttatttaacccaagataccttaagtattatcacttgctcaatattaaaattattaataaatttttgtggctttaggatacagtgtgtaatttatattggcagcctgctcctcttggatcacactcttgtttgacagctatgtagtggctatggctataaaaggagcagagtacaacagaataacactaagtagacagatagaagacatgggcacttcagcagattccatagaaaaaggacatcatgacccaacagcagctttgaaaagaccacgtagagaccactgtgggcagatggatctgacctcgacctgccctccatctcctcctggtgttgaaatttagacaaaagcaaagacataaaagaccatgagctgattggggaagctttgaatagagagttgactctgcattaacatgtacagagggtgtctcaagaaaaaactcagttcaggttagaacccgttagatatattacatgcctgaggttattggcctgaagacatcaaacccacgatgaaatctcaaaaacagtgtgtgactggcaaacaaagtcacattccaaactctaggaagtggggcttggcagtggccccttcccagcaatagttggcaaatatctggaaacatttttcattgccacaacccagggagagatgctacagcctcttgtgagtagaggccagcttcccccaagacagacacatgcacaggggtccccagcctaatctctacaccgagtaacccggcggggaggaaccatcaatctagatttcttaagacaaatgcagaggaagaaaatgaaagatttatctgtgttaaaattagctaccacaaaaggcaggcacagctgaggcaggcaagcctaaggaatagttaggtaactattaataactaatagttaggtactgggactctacttgtcttgggctgtgcacacctcttcttttaatacttcatttgggaggctggcttttttacctgaatatgctatgcacacacaccactttccaaacaatacatctatcgacctcagaccccacctgcactgggtttcaagtacacctctctctaaccaatggaaataagatcctcccctcataacaatgatcaaacttggacaaatccttctcattcttactctcgtcagatctgggtagaagaatgaagaagaccatctggcctgaattgggttcaggtacatttatgataaggcaaagctatgttctcaactgaactgaatctcctatgtaccatcttaagccatcataattaggtatgcacataattaaagtcaaatgcatttgggggagagacatgcgcagtaaagaaatgattctatcttctaacctataaatcaaaagggaactaccatcatcattacacctcctcctgaaccccataaaaggaagccctgaataatattcagggttcttgagtactaccacatttgtgggcgctgacaatctacagtgtatttcttcctaacctgcactgttgctttggttgggaataaagcttccttgcttcatttgcaattctgtgtggtccttatttcaattctttaagcaaaacaccgaggaaatgaacactctggctttgacatagactactggtaacacagcctcagactgcattagaggcagttcctgtgacactggagaatcaaatactgactcaagactctgggggaaattataggatgaggttgaccaaaggctgcaacctctcggggattcctgcttttctctcccctcatcctctccctgtcttaacctgtcaccctttagagggatgtcactgaggtgacaacagagttttctcatcctctgtcctctgcccaccagcagccaagctcccttgcaaggcccagagcacggtagagttgttttcacactgcaaaagcagctgagagactggcagaatgagggccatgctggccagggtaataaatctttttcccactatgctcacactatgtcctttctctatctcttaaaactcccctaagcaccacttggggagctgattgaggaacagtgccccaggctgacctccagggattcagaggcagtcgggtgtggagcctgcagtgaccaacacatccaggtcagcctggggtttgcccactgatggcactagaagccctgcatcccagatagcacagcagattggataccctgaggaaagcctcagaattggcactgcaaatgcctcccagtggtgcagatgcccggagaaggccactcttccccgggatgcttgtccactcacaaggtctgggattatcacggaccttccaggccaagcacaaaggacatcgtctctagaccaggatcctagtgatacttgcctcccttctggaagttgtagcaatgcatttgggtctttctcctggtaggcaccactctttcccattgccatgggaatctctggcatcaaaaatgtggaagataatgattagattggttatgtgaacagagctaacattggctgagacatggggccctttactagccctcacaacagaattctgtggtaaatgttcctaatctcccagtttacaaatgaaaatgaagattacaaattgaagcagaaacagttatgcaatgttatcgcaaagttcaaggctgactgatctgaattcttactcccacctaacatcagagcctgtatcttgcccattaagtgtcataaccaatgactaagtgaatccataaatgactaggggagggagaccttactacccagtgtatttcttctcttcacaggggtccatgtgcttaactatgtttgtgtacttaacatgcacacaaacgtagttgaatacgctcctcctggtagtaatgctggaaatttcattttaactttgaatctactgagccctggttaatcaatgcagcaattttcattctcagtagaagtagaagaagctgctctgggtaaaagacaggtttgtctgcccaggctcccttgagagatattcatctctcatttcacaaaaacacacttcatcttttgtgattcacaggaaactgttgattccttctggctccaaggataagcacatgacccagctgtggcctagacaaacactgcatattctcaaccatgacgactagtccaaggacatgtgcttgctccaggtttggtcagtcaaaacactgcacctctttaatccagaggctggctcactggccagctaaatagaattgcccccccacacacacacacaaagaaaacttcccggagtcctttgatatgtcaacctgtgggtcctagcagcccacagtctgtatgaggccaaggaaaacagaatgaggcccaacacaaaatagtaaacacacttaaaacattatgagttttatgtgacttgtttatttttgaaactcaattgtgtggttctcgggtgtgaactttgaggatgacaatgtcccatcccataataataccaaaaggttgggcatatccagaagtataagatgcctaactaaataaagagagaaaaagaaagagcctagagtcccaatttccccttgaggacacaccagcagtgatctaaaggtttctcactatgtcctacttcttaaagccagtgtcaccctggagaccaatccaacccactgcaacatgaatcttcatgggacactgaacacccaaactagagtaccccaacatttcagcattgtcagaactttggtaagaatgctaatggtaagggctatcagaccctcctttctgaggcaggagattgactcagtgactaggagagagagaacacactgcttttgcagacgacccacattcagttccagaagccacatccagcagcataggacctcctgtaactccaactccagggaggtctgatgtctctggcctctgggggcaccacagatcaggatgtggttatactcattaaaaaccaggaagtaaggtcttcttagccttggcctgggactatgctttggcttgactttctttcctggatgctattgaatgtcctcagccactctttaaggacttgtgttcagataggatttttctccaaggcatgctttagtcaactatttagatgcagcacacttgcaaatgttttgaacacatagaaaagctgcctgttaattacccaagtcagttctcccttgcagctgtcgctctctaacgagacagcagctgattaaaagccaacttgccagaaagagctgcgccaggatcaaaactgttttgttgaatctgagaaaaagtaaaagaaacaaggacaatgtcgataaggttgaacattcacacatttgttcagtggaatttggagagctaagagaatctgataatatcatcaaactaaaagatgtcttcagtcaaggttttttctttctgattggaaatggttagtcaaatggttcccctctgaccattgactctttgtttatttggtacataagggatgctgtcagggcccctgaacctgctaagtgctccaaaggatgtgccaacagccctgacaggtttgtgcaatcctacccccagcccttctccctaaggcattgtcttagtcactattctgttatggtgaggagacatcatgaccaaggcaactcttcaaaaagaaagcatttagctgggagcttgcttacaatttcagaaggttagtccatgaccatcatggcaggaagcagacaggcatggcactggagcagtagctgagaactttacatcctgattgaagtcagcaggcagagagacttcagagactgggcctggcatgggcatttgaaacctcaaagcctatccaagtgacacacctcctccaacaaggccatgcctcctaatcctttccaaacagttcagcaactgaggactatgcatgcaaatagatgagcctatgaaggccattttcattcacactaccacaggcactaaaggagctaagctggggctcctgttctgaggcatgcccccctctccccggtccaggattattttctgactttaaatccttagcttggcttccatcaaggctgtcttccatcctgtcctgacatgaactatccgtcagtttcgactttcttcttttgtaaatgtttatcagattctgtggcaatcaaacacagtagggcctgtgttctttgctgatggaacttgtacccttcagggaaccggctctatgataactcgacatggttatgccagacacatcctacgagttctccactgagtcccttgagctctgtgatcacagtggctaaactctgtgacagataatgttttttctcttggaaacattttcttgactagtttgctattgtgtaattctcttccttgcatggtcatttctcagaatagttgtaagtaaaagaaaaagttgtgttctcggctcccctcatgactaacattttccctctttttgttttttttttttaaatctgggacctttccagacataacaatgaacacttgtaaattctttacctaaatttactgcatgtcaatatatacttgttttattgtctctctttcccaaaactatgcatttcctaaaccatttgaaagcacactgtcagcagtatgcctcctctcccctaaacagttcaactagcactgcctaaataaggacattctctcataagaacaaatagccagaatgattacacctgagaaactttaaatttcccaactcagtttatcagacattccatgctcaaatgtatccagtaactttggtagctgtttctattttaaacccaggttatagcaagacttttaatttttttttaattcatgccacttgttatattttaaataagcaagaaagagtctgcttcccttcatagttgaggatctgcatcacaatggtttccccaaacctctgcaaaggaatcctttgaattgcttctagttttaaaaatatgtgcatggatcctgaagttcatgtgcaatgttcttatttcaccacactaataggcatggggtggacatggctgacattttaaatcctcactaaagtaaaatgcagaaataggtaaaagaaaatgaaaaggagaaaagtcagatgactttgtttgcaaatgctaagaaggccttgatttctgaagcagctgttcacaggggtcagcagaccttagaaatagcaaagagcgataggcccctcctgccaaaagactagaccttctcttcccctggcctcctctccctccaacaccagcaagaattgtggtgaacataccaatggagcaggcaagtaaaaatgacaacacactctctgaaaatccagagaaaaaacagaaaccaaagaacaaaacaaacaccaacccaacagagacaaatccagaaatcagcacctacaccaataatcatcccaaacccagatgcctagatgccagtgtaagaacacaataacagccagggccatatgactccactagagtccagctatcctaccacagcaagccctgaatattccaacacagacgaagcacaaggaaaagaccttaaaaacaactatatgaagacgataggtccttaaagaagaaataaataaataccttaaagaaaaacaaaaccaatagcagaaggaaacaaataaaactattcaagacctggaagtgtaaatagaagcaatagagaaaacacaaattgaaggaattcaggaaatgaaaaattcaataatgcaaacagaaactacagagtcaaacttcaccaacagatggaagaaagaaccgtagccattgacaatatgatagaagaaatggaaacactttcttgggaaagtgtcaaatctaaaaaattcctggccacaaaacattcaggaaatctggaacactatgaaaagaccaatcctgccaataataggaatagagaaaggagacaactgggttaaaggcccacaaaatattttcatcaaaatcatagaagaaaattttcctaatctaaaggaggagagtaccttcttgtacctacctatgcaggacaccaaataggttggaccagaaaagaaagttccatcaccacctaataatcaaaacactaaatatacagaccaaaacagaatattaaaaactgcagtgaaaaagactaagtaacaataaaggcagatctgtggtgatatcttgtttgtacaaataaagtgcatctgaagatcagagggtggaacttgccactagctaacagacagacaggaagtgaaatggctgggcagagacaggaagttagacaataggacagaaaaaggattataggtgagaggaaataggaaccaataaaacaaagagttgattctttgacaaaatcaacaaaatagacaaacccttacctaaactaactaaaagatggacagagaatatccaaattaataaaatcagaaacaaaaaggggaataaaacaacagacactgaggaaatccagagaatcataagacatactttacaaactgttttccaaattggaaaaccaaaaaaaaaaaaaaaaggataattttctcaataggtaccacttatccaagttaaatcaagatcagacaaacaatataaatagacttataacccctagtgaaatagaaatagttattaagtgtgtaccaaccaaaaagaaacaaataaataaataaaacgaagcccaggtccagatggttttagtacagaattctaccagactttcaaagaagagctaacatcagtatccctcaaattattccacaaaacagaaacagaaggaacattccccagttcattttatgaggccagttaccctgataccatgctcacctcattagatgttccaaaagtctttaacaaaatcctacaactctcatgctaaaagtcctggagaaattagggatacaaggtacatacctaaacataatgaaagcaatttacagcaagcttatagccaacatcaaattaaatgcagagaaactcaaagcaattccactaaaatcaggaacaagacaagtttgtccactctctccatatctattcaaggtagtacctgaagtcttagctagagcaataagacaactgaaggatatcaggaggatccaaattggaaagaaagaagtcaaagtaccataatttgcagataatgcataagtagccccaaaaatcacactaggaaactcctatagagctgataaacactttcaggaaagtggcaggagacaaggttggctcaaaaaaatcagtagtccatctacatactaacgtcaaacagactgagaaagaagtcagggaaacacccttcacaaaagtctctaatataaaatatcttggggtaactctaaccagcacgtgaaagatttgtgtgattaaaaacttcaagtctttgaataaagaaattgaagaaggtatcagacgatggaaagatatttctatgctcttggattgataggattaacataataagaatggctatactaccgaaagcaatctacagaatcaatgaaattcccatccaaattccaacacaattctttttttgtttgtttgtttttagttcttttggtttttttgtttttggaaacagggtttctctgtagctttgtaggctatcctggaactcagagatctgcctgcctctgtctcctgagtactgggattaaaggtgtgtaccaccatcccaagcccaacactattttttacacacctagaaaagacaattctcaacttcatatggaaaaacaaaaaaaaattaggattgctaaaaaacaatccctgaacaataaaagaactgctgtatcacaatccctgatttcgagttgtactcaggagctaaagtaataaaaactgcatggtattagcataaaaacagacatgttgatcaatggaatggaatttgtgtttgaagacccaaacataaattcacatactgatggaccctaactaatttcttttacaaaagtcagaaacacacactgggaacaaagaaagcatcttcaacaaatggtgctggtcaaattggatgcctgcttgtagaagaatgcaaataggcccatatttataatcctataccaaactcaagtccaggtggatcaaagaccttaacataaaaccagacacactgaacctgatagaaaagaaagtgagggatagcctggaaggcattggcacaggagacaactttctgaacagaacacagatagtgcaggcattcagactaacaactaataaatgggacctcatgaaatttataagcttctgtaagacaaaggacactgtcaataggacaaaaaggcagcctacagaatgggaaaagatttttatcaacttcatattcaatagaagtctagtatccaaaatatataaagaactcaagaaattagatatcaaaaaacaaataatccagttaaaacggggcacagatctaaacagaattctcaatagaggaatctcagatggctgagaatcacttaaataaatgttcaacatcactagccatcagggaaaggcaaatcaaaactactttgagattccatcttgtacctgtcagaatggctaagatcaaaaacacatgcgacagttcatgctggagaggatgatgcaagggaacacattcctccaatgattttgagagtgcaaacttgtaaagccactatggaaatcaatatggtggttcctcagaaaattgggaatcaacctacctcaagacccagctgtactcctcctgggcatatatccaaaggatgttccaccataccacaaggtcacttgctcaactatgttcatgcagttttattcataatagccagaacctggaaacaacctagctgacccttaaatgaagaatggataaagaaaatgtggtatgtctacacaatggggtattacccagctgctaaaaacattgattatcatgaaatttgtaggcaaatggatggtactagaaaaaatcattctgagagaggtaaaagagacccagaaagacaaatgggataagtaaatgatcatcaaagtatcatccacaaacccagtgaggttaggaaagaggagggctctagcaggaacacatggacctccttgggaaggggaaacagaacaaattttgcaggcagtgtgggaactatagaggaagggctcaggttgagggatggagggagagagacagctggaattgggaagcattggggtattgtggtgaggaaacctagtgtagtggaaacttgctggaatctatgagggtgaccctagtgaggaccctagtaacagggaatacagagtctgaactggccatgttttgtagccaggcaagactttcagtggtaggcttgggttgtattcagttgagttgttggtcaaagagatactgtggggatctctaaacaacccatgctgatgctaggactgaaaactgacagtggggtcccattgctaaggacaacacccacacagctcattggacatagagaggtcaagctaagctagtgcctgtgtagagccttcacccatacattctagtgtctttggcaagggaaggtactctgtaggctgcagagagagaacccgggacatcaaccctgtcacaaaaccttccacctacaatctgtcctgcctgcaagatgttatgatggttaagaacttccactacacaaccaatgccagatttaacttgaggcccatgccctaccctgcctggatggccagaaacctgagattggatagcccagagacctaagagtagaaccaaacacaactgaaaaaataccattcctaatgatattctgctgtactcataaattggcaccttttacaattgccatcagagaggcttcctctagcagcagatgggagcaggagcagagacccatagccagacattatacaaagagaggatctaggaggtctccatcaggtccctctcctcagaggtcgtgaaaccctgtggaagaggaggacaaaagactagaggagacagaggggatggaggacagcaggagaacacggcccactaaatcaactaagcagggctcacaggctgaaaccagttagcttggcatctttgtgggactcctaacagtaggagtgggtgtgtctctgactcctttgcctgctcttgagactcttgtcctcctattaggttgccttgtcttgcctccgtatgaaggcttttgcattgccttattgtacgtttcattgtcctgtttgatttttgtctctcagagacctgttcctttctgaagaggaaatggaaggagaggggatttgggggagaagaggagtggggggatagctgggaggagtgggaaacagtggtcaggatgtattgtatgagagaagaatctgttttcaatttttaaaaaagtagctgagagcagacttccccctagatctacggactcgggctttgcacacaggatgataaccagacaatggtcctggcatgtggttttccagaggaaaggattatcatactagacacttttaagacttttcagcttctttgaaagcagaagttgccatgtgacagggcaatacagtggaaacagagcaaatattctgcggctgcacgtattctgtccttccctatctcttgccggtgcacggaccctgttaggagagaggggtgagcgaagactcattctgggttgccagtgctttctctctcctataacagcagttccagtcatcttcagtgtgtaccacctctgtgaacttcttcagaacctaacgaaaagagagatatgcatacaaatatgcatacaaatacaagtacatgttactgcatacatctctttctgaaaataatttgagattgttactgtctctcagtttttccaccatttaaccttcttggagctgacaatgtagaatggatagtagagtacttgcctagtatgtacaaagccctggatccattccctaacaccacttcacaatgcagacactcaggaggcaaagggggattaggagttcaagtcaccctctgctacttagcaagtttgaggccagcatgaactacctgaggcactgtctcaaacataaatgagagagagagagagagagagagagagagagagagagatcttcacactgaggagttctgagttcccagtatctgccttcttctgttcatctagagttggtttggttcattttctctgccaattaaaaaattaaaaagcaggggaaattttgagaacaatcactaacagtgggaaaagtctgccagacacagcaggccattctgcagttagcaggtgaaagaaggctttcattagagatgaggaaacatacacagcgaggcgggcagagagaggaccctctgtcaagcactggagaagcggaagtcacctctctccttgagtgctgggtttttaaggttcctgagggagtcttcattccctaacttagggtgtgtcagtttgaagacagatagggtaaacaggatccaatgtggctgtgtacttgctggactggcccacaggcaggagggccctccttgagggagaaatggtacaccaggcctatgttttaagctgcaaggctttagcctcaggtcaggaaggagctggccgtcttaattgttgtggcccttctctctgtctgtcacctatcagaaaacttttctagctccaagtccctcgattctttgctagcagtaattaattcctgctttggtccaacacgctgaataaaagacttactaagctcttctctccctcaccctcaatgcattactgactgctttgtatgcagtggaaggttcgtcaacagttggtgaacgactgcacccattaaacatttattaattactctgtttgcaaagactgtactaaccacacagtttgccaaactttctcagtcaagagccagatagtaaatatttaaggttccatgtgtcaagatggagatctgagtgtgtaatgtatatgcttatgtaaccatttaaaatgtaaacaccaagacattctaaaaccatccttacttcacaactatacacaaaaatagctcaaaataaacatagaattgaataaaagggctaaaaatacggaactcttaaaagaaaatggaggcataaacctccacagccttagattgggcaatgtctatttgacaccaacacaagtagataacttagcctccatcaaagtagctttcatgtactaatcaagaaaatgaaagggagtagacagaataggaaaaggtatctcataggagtttaatatccaggaaagaaaaaaacaatataattaaaatttaaaaaatggacaagggacttgtatagacttctcaaaaaaaaaaaaaaaggcagatggccaataaatacttgaaaaggtatttagtattatccctcaccaagaaaatgcaaatcaaagccacaatgaggtaccagtgcacatcaaagccaccaggagctaccattttaaatctaatacaataagtaaatagatacaataaaggaaatgagaagtattgctgatggggaaaagctgaaaccctcatacatggctagtaagaatgtcaaagggtacaagaaaagttggataattctttaaaaagctaagcataaaactggtatatcacccagaaattacacttgtaaataaaagcctaagagaattgcaaatgggaactctgatagatgcttgcacaccaatgtggcattagtcataatagccaacaaacaaactagtctaagtgactatcattcagccatagaaggggaagaagttttgacatgtgctatgtggtggctaattttagatgccaacatgaatggattaagtgatatgcagacagaggggaaagtattatgtctgtatgtccaggtttatgtctaggagagtgtgtctaaatgagatgagcattggaatcagtagagtgagtgtattagttacttttctcgttgtgaccaagacatatggcatgggcaacttaaggcatgaaaagttgatttggttcagtttcagagggtatagtcagtttatcgtgataagtaagacatggttgctggatggtcttggtctatgatggcaggaacctatagcacagcttgtttataactcagtagatcaggaaacagagatgagaaaagaatctgggtcagggtataccctataggtccactggtaatctatatctaccacctaggtcctatgtccctggagttccacaccctcccaaaacaacagtacaagctaaagatacagtttaaacacatgaacctatggtgaatgtttcatattcaattcatcacactgagtaactttcaatatgagagggtaccaaatcagccgagggcccaaatagaactaaagagcaaagaaagagttgtcctgttcacccctcctctctccacagatagatatgtagacagatagatagatagatagatagatagatagatagatagatagatagatagacagacagatagatagagacatacagagatacagagatacagagaaacagatctagatattttgaagcccaggtactctttccctgcccttgcatactggaactctagctttccagtcttctcctccaggacttgattagagaggccttcatgattctgtggagtaatggatagctaagccacactattgcttccttgttccctcagcttgttgatggcaaattgttaggctccataattatatgagacaattagttctactaaatcacttttcatacatctatttatacatatataaattttttgagacagggttctctgtgtggctttggagcttatcctggcactcgctctggagaccaggctggcctcaaactcacagagatccacctgcctctgcctccctagtgctgggattaaaggcatgtgcaccaacacctggctatacagacctatattacttaacattgtggtatggtctaagaaatatcatcaggcaactttgctaatgtacaagcatcatagaatgtactcacacaaatctagatggagtagtctattacacctaggtccatgaggaccaaaaagcaacgcaagattaaatcaagcagcacagaaaacaaaaccatcaagttatgaagtaatcttgagctatgtgaagctgttgccagtatggcacaccagttgatctgacttatcaagattcttgctaaacttgagaactgagataaattctgaggcccaaaacaagggtctagttaagaagagattagagagccttcgtttggtcaaggagagaaagtctgtaagagaggctggaaaagggagagaccaagactgagagaaacgtgatactcagagagcagaggtcccatggacttctcagtgctgatgtcacagttttgagctggtcttcattggcctctaagtacacttagtgagcagggggcctgattcctgccattcacatgcccgggccaagctgcattcctcttggctctgtagccattggcctctggattgttatactgtgtccctcactgtccctcatgcttctgatcaaaccactaggaaacactgcccctgaacttgcccctgtttttaaatcaaagactggagtatctgctggtggtctgtaactaagttctagaagcttcactctttagtcctgaagggccaagatgatggctctttatgttgctagcgtggtgatctgcaccacttttgaaagttttcctttatgtgggtgcaaccctaaaatcagtaggcccatgacatgtgtctaaaccaagagccataggcctttgacccaaacttattcatcctagcccagtgctgtaacacttcaagagggtccacagtcagcacagtctccaaatccatcatattttttccctttgagacacagaataacagtgctgttggagaataaatacaggagttgggcaggaaacacaaggtgtaggtgtttgaggcatggcctgttcccacatgactacggctactcttccatctagtttgatggtgttctgatttcctttaactttcattaaactctcctgggttgacccatttgagcatcctgtgttgcacagtggaaccctgggtgagacaactgtgcttttatcacatttgacccaggagccccaggcaacaagcagtctctttctaaaacacttttgggtccctggcttcctcttattctccccacacccaaggctaagggcagaatgggagctggagccagatctccagcctccctcccagtgcccttttatcctgtcagaacctcacaaggggccagactcagaataatcacaggctttgctgttggagctaacattgccaggccctggccagagtcaaggacatcctcattgatggaaaaagcttcttcaggagaaagcaaatgctgaggacacaatccagagacagtgaacaaagaaagaaaggctgctatgctttatttgattaatgcctagagagaaatcatacggtcacttccttctcctgtcatgtatgggtgtgtgtgctcgggcatatatatttgcaaatgtacacccatgcatatcatggcgtgggttagaggttagaggacaagctctgggattggaccttgccatccatgatttttgagacagggtatcctgtttgttcaccaagatggctggctggccagtttccagggattctcttgtttcactgttttaccgcccatctcactctagaagctttgtgattgtagacacatgctaccacatctagttttgacttggaaagtcaagtgctttccccactgagccatatctccagcctggtgtggatctttctcaattgaaccagtaagatatcaaacagacccttttggtatttgctactgttttagtaaaaactaaattgagaacaagctgtaacagcagtcatagaacgtcacatatgggctgggcaagatggcggcacacccctttattcccagcgatggggaggcagaggtagggtggtttctgtaagtttgaggccagcttggtctatatagcaagttttagccaaccaaggctacatagtgagatgatgttcatgaaaaaaagggcggggggggtgcagtggggtggaggaaaagcctacatattgttgccatcttttcagctccagcttgatatatttgatatctcagtcttcctggtgattaactgatagtcaatatatatttcatatattgaatcattccagagaaaccaatcattctaaaatctgatcctttattccccagaacatttccatgtcatcatggcttcttgaaaatactagcaatacttaatagaagccatgttggttttgtgctgggattccatgttgctatgcattaaacaacggctgtttataatatagatgaacaagaataagaatacagagccattgctcttctgggcagggagagacatcattttcggactgacaatgaagggattctgagagcagaaggtttcagacttcccacatgatttcttttcaattgatcgtctcctggcaccaagcaaacattttaaattgccagttgttctctgaggttgacaataaatccaagcaggaatatattcaatatccacacagaattttgatgagggtgacttttggttctctgctgttcctataaagccaaacaaagttagttttctgatactgctgtttctttttgtattataaaaaccaaagcaaaaaatcaaataacagagacaagacaataaatacagaaattgatggaatttcagaaggatatgattctgtttcagaaataagaaaactgaagccaagagatgtgaaatgagttctcgaaggtcaaagagatcagagtggcctggaagggggtttctggatgcatttgaatacatgacagatcattagatgaaggagactttgttattcatgtcatcagaccaacaaatatagcgatattggataatgaaaggggggaaatataccagctagcacagaaaatagagcagtacccaaggaggaaggcctggtagtacctctgtgattgatggttaatctcagttgtccacttgatgaactcaagaatcacccaggagacaggttctcttgccatacttgatggggattaccttaattaggctaattgaggtgggatgggaagatccacccactgtgggcagcaccattctctgggctgggaaccaggttacagtggatgcaatatgaccaactgcctcaagctcctcctgctacaacctcccagctatgatagactggacctttgaaatgtgagccaagataagccctttctcccttaagtcatttttgtcaggatagtcttttatttattttcgttttagcaataggaaaagtagctaactcccccccaccaccccaactgagtaacaaaaaacgatgtagagagaagattgagtagatgcctacaaaatgtcccacatctttcacatcaatcataacttggtctcaaaagctaggatggtagaaaacactgagaggagcaataaacgatggctttcggacttggtagcattttagagtcacaatgaagcttatgaaaagtctgaatatccagatcacagcccagacccattttatctacatgatttcaatgtggtccaacttgtatactaaattcagagccattgctctggacaaccctaggataggacaaggaaaggaaaggtagagacaggttttcctagattcttgaggctgacactcttatttcctctccaatattccttgccttggagcgactgcttgaaacacagtctcttgtctttttattagctaaatgatgacatattgggcactgctgagtttggaccatcctaccattgactgtttttatttttctttaattaatcacactttctaccaaatcacccctaaatttagtgatttacatgaatggttgtcctgtgggtcgactggataatgccactgctgacattctgggttcactttcacagttgcagtcagctatgctgagcgatgaggggcggacttactcacatctacagctggtgttggtgatacatgggtcttctagatccctttccttgtgacccttcatcttcagaaactagacttccttgaatggaagtcacatgaacattgcaagagaataaaagggaaatcacaaatctcttaagaaaagacctcagaaataactataacatcactttggctgcattttgttgattttaatagaacagaatatgtctcatatacctcactacaggaaatgaatttgcctgagggcctcaggtgctatgattcacaatgcattcttgtacttgtacagaggccacagatgagacaaggtacatctttaccttgttttagctcagatttcttccctacttttgttctagaggattctctagtggctttgcaaaacctttcttcgatgcttctacctaacgtcccctctcccttttcacacatgttgaatttatatcatgaccttgtggctctcccaaatttctcttaggattgtttcacataatctcactcccacactcatcagatctgtgcacatttgctctgccttgacacctttaggaggacatgggttaaaacagtgtggtagttaaacatcactgtcaacttcactggatttagaatctcctaagaggatgagtatttgtaaggaggattagcttagagggaaagacacaccctgaatgtgggcagctccatcttatggggctgagaatctgagaaccataaagggaaaaaggagaatgaagggtatatcttgatgggacagcagtcacccaacagaggaacatggaagttcctgccatctttgaaaataaatagcatggtttccccctcaaaaaaatggctcatttttcactcatatcccatgcattgtgggtgagttgatttccactcctaataccatgatgtacacgtgatcaattgcttgccaatgagggatcgccgttggcttatggatgtatccttgttaagactaataaagcagtgaggcttttactggaaatttagggatggagattgcttttctattggacttaaagcagggaattgtggggctgtggctctccacatgggttctagtatttcagtttctcttaaccatgcctccatctatattatttttgtatcactgtataagaaattaccatgcgttagtggtttaagataatatatgtgttagttcactgtttcaggggccagggcattcctatataaatttttttcagagtttcatgaatttgaaaatcaagggtgtcaggaggcctgagtgctcatttggaggttcacatgggggaataattgctcctgggttcatttaggtggttggcaaattcatttccttcaagttatttgcctgaaggtcctggctttctgctggccattggctacagttcactctcaatatctagccgcccacagctcttaccatatattccataatatttcaattgcagcctgcaggaggaagttacaaaatggttgggctagtatcctgcaacctttgccatattctattggctagaggccaagttgcaagcttcaccagtatacaagacaaggggattttacaagactcacctattccaggccgtattagtatgtacctgactctccaagaaccaagacacactaaagaaggtggaatatgaaaggttcaggcattatgctggcctgcccctgttacctggtggaacaggcagtaccctggtcagcccaaggttccatggcaactaagtctgcacgcaggtgcagaggacccctttaaaagacaggtccctgcccatttacgctctctgtttcctctctctgtttcccccgctctgctttgtctcagctttctctctctctcatctatgcgctcgctctgtctctctatggcgaccggccatggcggtcagccattatcctgttcctcttctcttagtctccctactctgtcgggcttataataaacttatagtcaatatgtctcttgtctcagcatttctccttttcttctttttcaacaaaagaataacagaatatgggccattcattgatggggggattctttagctctgtcccttctttcccagtgcaccacaccacagtctgtcttattcaccttctctagcaagcccttccaagtgagcaatcacttaaataaaatatcacaactgaatcgggtacttttcaattttattttttgttcaaatgttgaaaactgtgtgaatttggagttagtcagctagactaagttaagaggatcccaacttcgttggcaacatttgaatcatcacgatcaggagagagctgaacatgtaacttctgaccgttaagcccaagtagggtcttggtcacattcgtgtcacagagtttctttctagtcttaagaggtccttttggatctgtcccacaagtccactagctagatgatgtctgcctctgcctgcttccaaactgctaaaacacccccatctgatacacaagcaataagagagagggcaggtgttcacaggcctaatttgtttttgaatagcaataagaggagccaaacaatgactacagaaatggaaataggggcttggtggcatgctgaaaagcacacagtcccaacacagaaatgttggacagtcttttgtgtttgtttgttttcttgctttgtttttctttttagtgattctttgagattttcacaccatcatgaactataatcccactcatttccccgtccttccatatccatccctcactccatagagtttcccccaaagaaaaaatttaaaaatattgattaaaaacaaaacaaacaaaagacacgtcactcctccatctttcctgcctctccaacacctccttattcatcacaggggcatagggagctgctgtgccacacagcatacacttttgtccactcagctttaattgcaaatgttcattgtaatgagttgttggtctggtgtaagcccctctggcttctggtacaccattaatatcagaccctcaccaaaactcctctcagatatcctgttcttgccccaatcatggagatcccgcagctatggttccacaggagcagtcctttcacacactctatcaggtcatacatggggtagattgtcatggcccaggctgtctcagacctaagccacctcagcctgagttggggaatgtggacttgaaagctcctagcaacccaatggcgataaagaccaaacacaggcatcttgtcatctttagagagctctcagttccatgttgtaaaactagaatctcttgtttatttagcatcttcttggctgtttcttaaccatgcttccatggccacgaggaggccatttctctcctcctgacccctctctgctccatggctcctaactttcctccttgttacttacatacctgcccctccacccaggtgcaggcctattcaaaagcttagttctgtagagatgcaaactaggagacaatcctacactgaagctatgctaaacaatagcagacttgctcgaattagcaatagtgggccggagcacccatgtgctctgtttactgaaaccagaggctggacctttagacattccatagtggaactattttggtccccaacagtagatgatggagtgggccaactcaaagtcctggatgccgggctgggtggtagttgattaggtcagtctgggcctctgggaccaccaccctcaagtgaggggccaaatcagctcttctactcctatggtgaggggtagggtcagctctcctgtgaggggctgggccaggtcttctactgcagtggccagcaatgggcaggttcaactgtcccagggccagcaaagggtagtgccagctcaacatggccctcagatttcaacagaaatgcttcctatggtaacatggttcctgtagtaacatgggccacagagatcagcacagaccccagctgcaacaggaccacagacccagacatggttctcagcagcaatctgggcctgtacatcaccgtggcccccagtggcagcacaggccaccctgagcagcctggctgtaacgtgagttctaataggtcttaatagaaaaagcctgaagtcagaaataggggcaaaagctgaaagatcagaggaatgaaggagcaagccacagcgacactttacctcgacaacttcccagctgaaaacagaggaagttactgtcttctcatcgatattcctctctcagtccagccatctccacctcactagtgctgggattaaaggcatgtgccatcattgcctggcctctatggttagctagtgtcaagctccactctctgatcttcagacatgctttatttggacaaacaaggtatctctacacctggccttggtgacagcatggctcttaaacaccaacatggactcaggtggctgcacagacctggatatccatcctctcagctttcagtggaaaccaaagccatggatgtcaacataaatcctggctgctgtagggccacaaatgttggacagtcctacaagtcaagtgctattctccccatgtaacagatgacataacttgaggaagacagacaataacttgctccaggtcacacagattggaatcaaatcaggaagctgggctctgaagtcctgttctgtcctcacacaccatcatcctgtcttccaaaggagtccctttgcagcaaacattctagtggggcactgacctgcccacagatttgcttagacaagagcaatgagatattcaaggaagcactttacccggagggtcactgcattccatgtgagactgacacacaaggaaactgagtcacagcacagcggctcctatatgccccttatcagctaaaaagagagcctcatgcagcacggactcaaagtgggtaggtttatgtgtgagacacctttgtttcagctctgagataacttttctacagatacagctcagcaactgtgactcaaggaaaaccccactgctataacaggagtaagacacttacctgaatgcctgggaaagactttggaacaaaccccagctgtggttgccaaggcaccacaccattcaggggaagtcattgctgctctccgtgagagaagtggaaaatcctgagtgagctgtttccttctctagacagcagggcattgtgagggaatgaaaaacagctttggcctatttggccccaaaagacccatttgctgtcaacctagttgtttcagggtagattaaagagttttttctgcacttcccaggtaataattgcatagtattatgtctttcccccatggcttccttttttactggtggatattcagagaattcaagaattcctatagatgctgtactctgcttacagcagtgaaaggaccagacaggaattttccttgagtcacagttgctgagctgtatgtgcagggacgttatcttagaagccaaggcaaaggtgtctcaggcacatcagagaattcacctttcttagggagaactgagaacctgtcctagggtttttattgctgggaaaagacaccacgcccacagcaactcttacaaaggaaaatatttaattgtggtgacttgctaacagctcagaggtttcgtccattatcatcatggagggaagcatggcagcatgcaggcattcatggtcctagagaaggagctgagagtatttacatcttgactcacaggcaacaggaagtggtctgaggcactgggtgtggctagagcatatataagacctcaaagcccacctccacagtgacatatttcctccaacaataccacggaccctaatagagtcactctgtttggggccattttctttcaaaccaccaatttctctttctcatttcaggtcataataccaaggacagaagtttccagggaccccccattctccaacctgtgtcatctagttattgtggagtgtaggagaagaggtgcttagcaaaagtgtttctagtgaagggaccagctccgctttcggcagccataacggccgaacacgtgcttgtctgaccttgtcctagacactagaaagtcaaatgcctgcctcgtcacaaggaaccaatcagaagttagctggtggcgctatgctttaccaccctgggtgtactttacggacaagcacacagcaatgacgcacagagcatagcaaccaccctgggagggcctatgggccataacaatcaattgaccaacacagggaaagccctccaagcctggaggcacaccaatcgtgagcctgtgcgtacccctagacactccccttacgctgtcctacaagatctctcgggagcccctaggagttgtctttgctagccatccgccatggcgggtgggtgaaagacccgagctaacatgggttagctcgttaaaaaaaaaaaaacaaaaaaaaaacaataaagcctcatgcagtttgcagcaagcactcgaatctgcctggtgattgggtgacctcagtcgtggcctgggaccccggatacctgagttttccgggggtctaacactggaacacaaacttatctcccaaaatgttctctccaatatgtagctgacaggcacacatgctacaaaggtcttgaaaggaaaagaaaagcagcccccctcaaaactcataatactgatgggtattatatcacagcacgggatgggatcaggaggcagtcttttggaagactattggctttcttcgtccttgtgggaagtaaagaagactagatagatattgcactttctgcaatacatggactagctaaaggtctgcctctgcagatgccaagggggttctcagtggactgaatctaccaacaccgtggtcttgaatttgatcctcagctgtgaaaaataaatgcccactgcttgatccacccagcatatggtatttttgtgatagcagaagacaaatagctcattgataaattttctattgtttccatgtacaaataatatattggctccattgggtctgatgacataacttagttttctaagttcccttcattcagtagaagatgcaaagtacacactcgttacttgctttctatttctatcacacagtgctgattttaaacactgagagttttttaaaaaattaaaaccagcatttaaaaaaatactttgaagctgggtactatggcacatacctgtaatctcagcacttgggaggtgaggcatgaggatcaagagttcaaaacaagccttggatttataatgagtttgagactagtctgaactacaagcaaaacctgaactctctctctctctctctctctctctctctctctctctctctctctgtgtgtgtgtgtgtcacacacacacacacacacacacacacacacacacacacacacaaagacttcaagatagttgtagattcataagttaaagaaaataatccagaaatccctcgtaccctttcctatagtttcccttgcccaaaggtaacttctgggaaacttatagctcaaaatcacaagctggacagcgacatccttatggttaagattcagaacgttcccaagaccactagctcctcagacacatgtattcatttcttgttacgttttgagatctttctcttttgggggtagaagtacttgttctgatattcggactggtaatatgtacgccataaatggagttcttgctggccgttggtgacccatgccttcaatcccaccacttgggaggcggaggcagaggcagaggcaggcggatgtctgtgagttcgagaccagcctggtctacagagcaagttacaggctccaaaacaatacagaaaaaccctgtctagaaaaacaaacaaactaattggtctaactaataaaatcccagagtcaaataaaaaaggaaaatgctgagagatcagagagaaagagcaagtcaccgctacaccttacctccttagtgtctcagcagacaagagagcaagtttctccctgcttatatcctgtttccacccagatagctcatttcctgtctgtctgtacagacctccagacctctagtggcaagctccattctctaaccttcagacaggctttatttgtacaagcaagatatcaccacagtactcatattttcatcctgttggtggaatctttccgaaaaaaataattttagtcaggtggtggcagcacactcctttaatcccaacacttgggaggcaggtggatctctgtgagttttgaggctaccctggtctacagagctagttccaggacagcaggactgttacacagagaaatgctgtctcaaaaaaaaaaaaaatcccagaaaaacaaaacaaaaaaaaaaacccccaaaaaacaaaacaacaacaaaaaacagaaaaaaaataattttgatagttttatttatcaaggctttgtttatgtcttaatttacatgattttagccccaagcctaagaatcaatgacttatatgttactttttttctgtatttttcccctaaacatcccatggttctgtaattttatatttttatttatgattcattaacttttctatacagtcaaatctgccagtagagttgtttatctctgtggatctctagcaacatttgcagacaaatacatctcatctttcttcattgacttgtgctactgtggagagtcaggtgggtatatttgtgtagatttgtgttacgataaatctttctgccaaatgccgcctgagccccactgccacgtgtgagctttacgccagccgcccgcccaagttaggtccaaatgaatacacagaaacttgtattaggttcaaagctgcttggccaatgactaggacttctcatatgctagctcagtcttaactatcataaatctatatagtttataagacttatcttatcggaccacctcattggcgtccatccttgctggtggatcacattgtgccactggagcaggagcggaggggaaaagagggccctttctgtttctccttcgcttaaatatgagtctccttgttatgtcacttcctgcctggatcatcacttctctactacatttcccagaatcctctttgactcctagtcctgtctacttgctgtctcattggccaagcagtattttatttaacaatcaataagataaacatacacagtacattccccatcagacctgtttttatattttctgttccatggatgcgggtgtctgtcttcaccagcaccatacagtagctccataaaccttagacttaggtagactgatgattccattcagttttctttctcaaagtcatttaagccctcctaccttcttcatgccttctttgctattctaacatttgatataggataaatcttatttaaatctacaagaaaaacatcacccaaggatttctctttttcactgtaaaactgaaatgctgttgtagctttaattttagccttcactaccagtatgtgaaaattgctttaaatatatttatcttatacactgagaggttaatgaatctatttagcagctataagtggttcccttctctccttcttttccccacttctctctgtacaaccaagcccagggcttatgcaaagtaagcacttgcccagccactaagctatacctccagctcccattcagttgttcagagttctcaactgtgtttttagttcaattattatggtgttaggtttaaaattttcactctacttcatattcatttagtgaggctgtcttgagatttttatttcttgctataagttatttttcattagtcactggaacattttcatgtttgatctctttacattgttgatagataatacccacctttgtgttgacatctcttagttgttacttttcattcattttgagacattcctggttcttggcatgatgactgagcttcaggtgaaatctggacattttgcatgtgttcatgtagaggccagaggtcagcctatgtcattgtttgggagttatctactttgttgagacaaagtcttccaccacactgagcctaagcctgcagacttaggctagctaggagacaaggatctgcctagctctacctccccagtggtgggattatatgcacatgccactgttcctggatttttttttacattggttattaggatcagaactctggtactcaggtttgcctagtatgatggcttatgtctgtcttctgtcaactcaacacaaactagagttatctgaaaagggggaattttaattgagaaaatgtctccataagatctggctgtaaaccattttcttaatgaggtattgataggggaggacctagccatggttggtggtgccactcctgggctggtggttctgggttctgtaagaaagcattctgagcaagtcatgggaaacaagccagtaagcagcacccctccatggtctctgtatcagtttctgcctccaggttcctgccctatttgagttcctgtcctgacttccttctatgatagactatgatgtggaagtgtaagtcaaatacaaagtagaccctttcctccccaacttgcttttggtcacggtgtttcatagcagcaataggaaccctaactaagtcacccaataggcactttactgagtaatccatcttcccagctcactggaatatatatatatatatatatatatatatatatatatatatataatatatattggttttctaccatcttaacacatcttgagggtcatttgttttctgtatacccatggaagctaattattgctctgggaaatgccatatcccatttaatgtgaaccatagccttaagatgtcagcactgttgggactcccagtttacagttgatcaggagtttaaagagggtccatgtagctcaccccaggtaactggataattaagccaagccagaaatccaagaatggccatgggtttctcaccatgtgcaaaggctgtagttacggcaacgctccactgggataagaacacaaagaacacatacctctgtgtggttctttcatgctttttccttcggcattggagatttacttctgtttacacttaagactcaagctctcatagctgaggttgctagtgtagtcattcctgtatcttacaaagtagatttacatgcaggatttgaactgttgtgaatgccagagataaatagtacatgtcatagatatgttcctaaggactcaaaggcccccttgatttatcccagagagcataccctgctactgtggaccgataaggccattgctcctgaatttttcaattgtggcatgcctagctttaagagaaattttaactgcacactcatttaatcttcttaaattttgcattccaaagcaagacctgtatgttggaagacacaatctttggggaatagatttgcttttgaatagaaaagcatatctacgcccaatttccaaatctctcattgttctatgtgttctctgacctaaatatttctgatactatggaattctttagccattaggaagagaggagataggagctgcaccactcgagagagcaggtcctgtacctgccagagcggcacaatggagtcagctgtgttagcacaggggtgggtgagccagccctgaagatgagagcatggaagaactgcccccttcctcatctgtcttgtgtcacataggcagaggaaaaaagtcctcctcaccatctatcaacccctagggcaggtgggagagctgaccctgtggtcacaagagtgagagagctgtccctgaccctcaccagctgcaacacttaggagaccaggccctgaaccctgtcagggtagcacatcagagtcagccttgtttacagtggtataacgaggttcttgtctctctatggtcctgacatccttcttagccccaaatgaacacataaatgctatattagttatgaaactgatggctgttggctagggcttcttattggctacctctgtcttaaatattaacctatttctattaagctgtttccacgtggtcttggcttaccagagctaagacctgttactcctttggtggcctacatgacaacagttctggtgggtccctgcctagctctcccagaattctcctcatctccttgtctcgtctatcttcctgcctcattggccaaacagtgttttattcatcaaccaataagaaaaacatatgcagaaggacaacccccatcacagaggtgtgggtgagccagccccaaaatcatgagcacaggacacctgtccccattatccatctgccttctggagtcataggcagatgagagttgccccagccgcccatcaatgcctgagcctaatgggagagctggccctgtggtcataagagtgggagagcaatccctgacccccaccagctgcaacacttgggacagcaggctctgtacctcatcagggcagtacagtagagcaaaccccattagtgcagacatggatgagtcagccatggaagagctgtgaccatgggagaactgcccccatttcccttctggtggaccaaccctgcagttgcccaggcccagaactagggttatgacttggtctactccaacatccacctcatctatgatctgctggtgcatgtgaagggatctgaaccacagacccaaagcagcagaatctccataacacaaggtagcagagggattcccaggaagagtcctagtgggggcccagcatctaatgtgtagtggagaccaggggcctcaaaacaaatcagtgactctttgcaatggacactgcacatctctacaatgcaagtagagatgaatggacaaaggggtttacattgtgacttgttgggtcgcactgctgcttccatgatgaatttttttaaatacaagggaatttattagggaaaaagccttacctacagagagacctagccagccagcagggcagcagtaagtacagcaagctgaagacaaaatggaagaagggaccagccacgtgagcacccctcactgttaaacctttcctatgtcaccctgaccacgcccacgcaggtgtggctacagtgtcccctacaggacacttagattcttacctcaatgtttgcaactatttccaacctccctctccctacatgggctatccaaaatctgtacagatctcctaacattctgtagtccctgtcttctctacataaattccccaggtcccctgatgttatctgggtttccgttcacagattgcccctaggtatatgggtattcagaagacagtgctggcgtcctttagggggactaaagtgcacttagtcagtactaagaaactgtaagattgtttccaagggatcctgaggctcacagtgcaggaatacaaaagctccaagtgattgaaccagtctgaaccggtttgaaccagtctgaactggtttgaactgatctgaaccgccttgaacccgtcgaaactgtattgaactagtctgaaccagattgaaccagtaaaacatggattgaaccgttctgaatcagtttgaattggttgaaaccggattgatccagtctgaactgttcaaactgttcttaactggtttgaaccggattgaaccggtaaaaaccggtttggtctggtcaaaaccagattgatccagtctgataccactttgagctggttgaaattggtttgaactagtcaaaccggattgatccagtctgaactaaactgttcttaactggtttgaaccggattgaaccggtaaaaaccggtttggtctggtcaaaaccagattgatccagtctgatacaggagctatggccgatatttctcgagaaagttggttgccaaggtcatagtgagtggagcatctgtctgcctcttgaaaaaaatggcccccttcgcaaagggattccctacttttctatttttaagctccaagctagaaaagctagagagtacaaactccaggagagggccatattgtttttgaaagccttttgtcttggggtttttgtggttccattgcaagttgctcccttacaccatagagcctgcttcagcctctcccagctgctctggtgtcactgttgcactgctgcattcaccatggctccttggagccccgtttgtcctgctgtggccccgtaagaagtcctactgttgggcctgaagggtgggtgtgcggtggggagatgaactagaacatcaccaaagccataatatatgaaaattcagtccggcgtggcctgtgctgtcattcagggtctgccgatctctgaatgacagttgacgctgacagagccttggacaccatgaacactgatgtgagtaagggaaagccaatcctgatcatgcggtctcagaggattccctctttgagaaagtctggtgtagggaatgtcttcatgaagaacgtggacaaatctattgacaacaaggcactttatgatactttttcagcctttggaaacatcctgtcctgcaaggtggtttgtgatgagaattgctctaatggattcgtccacttcaagacccaagaggctaccatcgagatgatggatggcgtgctcctcaatgactgtaaagtgtttgtgggcagattcaagtcttgaaaagagggggaagctgagctcaggaacaaggccaaggaattcatcaatgtttatatcaaaaactttgaggaggaagtggatgatgatgatctgaaagaactattcagccagtttggtaaaactccaagtgtcaaggtgatgagagatcccagtgagaaatccaaaggctttggcttttcaagttacgaaaaacacgaggatgccaacaaggcctggatatcagtaggctctcccatcctgtccagacccgggatggtagttttgcatgatgagatttttaattccttccctttcaaaaattttttctcattttattttcttctgtttttgttgttgttgctattcttttgaattttgttttgttaggcaaaagtgatgcatacctttaatcccagcactcggtggaggggggcagaggcaggtggatctctataaattcaaggccagcttagtctacgagctagttctaggacagccaagactatacagagaaaccatgtctcaaaaaaccaaaaagaaaaaaaaatgaagaaaattccctataggcttattgaggcattttctcaaatgagcctccctcatctatgaggactctagcttgtgacacaaaaatgaggcaggacagtcatcgttttcagctctcattccaataattgtgactcccttgtcacagctcagtgatctgatacttgctctgcctccacaaactgcactggcccagccctgccttttagcattatgccgggttattgttttttcctgcttgtttttctaatctggacatgatgaattggggtagactttactggtatgatggaggggtgtgtgatggggagggatggggaaaggggctttctactgcactctggttagatctgtcttcccctgctctgtgcctctgggctgtgggcttcctacctgcctctgttggtgttcctgtctcaggtgggacagggcagcttgagatatgcaattgggtgtttccttcctaatgttcaattatgctccaataaaaccctaatatgctctaggaaaatctgagaacttgagaatataaattgttctcctgtacagaaaaagtttcttcttcctcaccctgaagagggtctctgatcttcacagtgtggccataggtcaagactgaggagtcaaccacagcaaaaatgtttgttctctgcttgaagttttgattcaaaagattccattggttggctagtaatctgctagtgtttccacccttggtgctgactttgggggcattggctctgtaagttgtgactcctctttgctgcttgtttgtctctccattttgtgcagggtggggtcaacacagcagtggtctcagtctgacagacctaagaattgtgtttttcagtcaggctttagcttgctttagggcatagcactggtagaccatctgtttctgttcagtgtgctccttacaaacagcatgcattagttgctgtgttttgttcaatctgataattccaagaagttaacatagagactagtgattaattggaatgcaagatttaattttattttcgaaatgatataattacatcatttcccccttccctctcctccctcctaaatccttccacatacccttctttgctctctttcaaattcatggcctcttttaattacttgtgttatatgcatatatatctatgtatacgcaggcatatatatgtgtatatttaggaatatatgtttaaaaatgagtaacattctatgtaattatgtaaaatatatagtatatattcatatatgtatatctatatgcatgtatattcctatatagacctgctcagtttatataatgttacttgaacgtatgctttcagggctgacaatttggtaccgaataaccaattgatgtgctctccttttcttccactctcaccattccttagttgcctctagttctttgtgtaggactgaggccttgtgggctttctcccatccactttggcatgtctattgacttcacccttgctctcctcatggttaggcaatcatgttggtgagactttatgtgtgtaactttttggcatcactacgagacactgcattatagcaaactctctgatcctccgactcttagaatcccccctcccccgtcttccaaaatgtctcttgatcctgaagttcagcaattgttttgtagatgtatccattgggacatgactccataactctgcattttgattggttttgattttctataatgaactccatctgttgcaaagagaaatttccttgatgacgggtgaatattacattcatctgtggacataaggacaaatagagtgttgttaggggttatgttggcttagtaaagtggtggttgtaggttatctttcaagaccatggctttactcgccatgggtagttggctggatttccagtacctggaatgagttccttttccttgagcaggtcttaagtccatctagaagctgttggttactgcaaaggtatgtgtgctactactgcactcttaggactatcctgtcatgttgattgttgtcttggttcataggaaacatatctaggtaggattatttgctgtctctgtcctttggaagcttgcatggcaccttctgttaccatgaaaactagtcctcagggaagaggcattaaggtcagttccagattaggagcattgggacccattgcctaaactggaccctatgcctaaagtgcaaggtctcttcagccacttcttgggagtggcaatcaaggacaatgcattagcctgtaatgttttgggatagccctgaccaacaattcaaaagaagactttgcatgcattgtggttgggtttttgttaggtggtgtttggctgttggagggagcactatcagcccagataagaaaatttcatttcaactatgtatgtatgtatgtatgtatgtatgtatgtatgtatatacatagacttatgtgtattagttttttccttagttaatagtatgattccttatggctttgcacacattctgttattttaccttcctgaagaatggtttcaacagagattttctttaattgcttgtatttagcatcattaaactagtttcttaatgttgaattccgtaaaagttgatttaccctattccattccatctcttgattttacttcaaattcaacaacatgggcatgacttattttatgtagatgtctctgaataactgttcacccaatgtattaagctacaaagacttagaagttttgtttgtttttatttgctgtttgttcttaaagaatacatacctttgttaaccagaaaaaaacttgggaaacaattttaagtattctgcctcaaaatatggtctagataaagctcctttccttctgtaatctttttaaatacatgacttctctttctcccagcaatcaggtgtcagtgtatgtgacaatactttagtcaaatactgttgtggaataatccttctgtacactgtaaaaatgtgctctcattgttaataaaaagctgattggctgatggctaggcaggatattcggggcagagagaattctgggaaaaaaggggcagagtctgaaaagtctcaagccagatgtaaaagaagcaacatggaaagttcatagatgagtcccaagcagacgcagaaaaaagcaagatgggtatgttatactgagaaaaggtaccaagccatgtggcaaagtgtagataagaaatatgggttaatttaagtgtaagagttagctagtaacaagcccaagctattgccctagcatttataagtaataccaagttttcattttggttatttaggaactggtgggtgggaaataaaagtccgccaacaaaacatcttttcttctctctgcctttatctgccagcaacatcctctgctgaagaggagcaagaaagtgcgttggtgtctcccaggaggaagcgtgtttggtaccactggggattgttcaagggtggtatggaactcattcaggagagtggcctgggatggacagatggcaggaaggagtatcagttccttgacatggggggaaaacttgtctttagaaaatgctctgctagtaaggtctagaatgacagtgtctttcacacttattgggcctttgatcttaacatgacacatatatgcatgtgcacagtgtacatagggagacttgcttatctctgtggctatttagaagcatgtaactcagaacatgagtctttattttgacacttcatttcactctgggtgcccagacattaaatcttagatcataaccatgcactatagttgggagcccattcacagcaaattatctttttagccttcactgtgactagttcatcatttgcttggccctgatagttcttgaggctaattctagtttatggattgtgattttaagacgcagaagaatatagacagatcctggaaggactgtctgtaacaacctgcagcatataccattgtatatgaaaaggatggctccttcggcagttttgaaaataattcaaaaacatagccaggcagtgggggctcacatctttaatctcagcacttgggaggcagaggcatgccagcctagtctacagagccacttccaggacagctagagctgttaaacatagaaaccccatctttggggcagggaggagaaaataatccaaaaacacaacccccaaattgtgtagttgtcatgctctgtacaaacacttgtaaggagtgcagctggcattccagaaattcaccttttctagtggaaagtaagcaatctacagctttttcttaggagtggagacagcgcttggtgtgcatccaatacctgcaggcctgcccttcgcaaacagagattatatgcagcttctgccttttttttttttttttaaagaacctttctaaactgtctctgttagatctacacctcatcatccctcagccagagaagtcccacttatgtaccactcactgccttttaataaggtttttgtggggccaggaatgtagctgagagctagagcacctgcctaacaaaggcagggccctgagtttgatcctctgcgctgcaacaaaataaaatttagaagttaaagctattttaaaatttgctgtaattagtgttctttcccaaactagggatcagttttgaaaagatggcaccaggaaaggctaggaagacaaagtttaagaagttgtcagtagtggtttatcattctttcctgtgacaatcatgtcaaaatgcagatttattctctgagtcaaaatacttctaataaccacaggggtaagcaaacctccctctgtacatgtatgtgcacacgttatgagcaaatcatggttagagcctacatgtatactgacttccatggagatcatgtttttaaagacttgggttcaatgtcctaccccaactaatatcaactctttgtggccttctttgcttcataggcaatgacttatctgcttaggtatgtacattcacaaactaattttgcattcttcctgcctagccccaagcacttgcttatcctttctcaccgttccttaatctaaatattttatctttctagcacagctgcccatcccaaatatggcactttgctttttggtaattagtgctctgacacaggaagtgatggagagaaagccaggtagcctagcctatgggctttctccaggtgcacaaaaattttggctttggctaaagggcttggcagtggcacacaggtgcagcccaagagagccaatagttagtgtctctgtcacactggcaggtaaaattgggtgtggctgaatcagcatgactcagtcggcttgcctccgttgctgactagcagaatatcccaggaatgggcttcctacagctcaaaaaaggaagcaggccacccttgttagggtagttctggtcccagaatatccattgatactccagccctgacatggacctgtacctctggtgtgcccctaactggaactcacgtggacagcatcttcttggatgcactagcttcctggccacgggtacagagcacagtgtggaggccccacttgcagatagcaagaatttgctgagtttcacttgctcgcaagtgtctggtcctggtcctttcacttctgaagatgcttgaaagagctaccatgcacatatttgagctaactgcaataaggcagtctcaagtctatctcctggtcaggtcctgtcaaccaagttacacacacactgtcagagctgcagaggacatcaaagcagagacagaacagactactcacttctgttaacatgctcactgcaattgccttctcaattaaggaggatgattggactgatttttaaactcaggtttaagaggcagaaaaatatttgggcctttgaactgcattcttgaggaaaacaggaagaaaggatgtgaacacagatcaagtttcaatagtcttgaggcatgaaaactgagtatctttacacttttttctgggcatcatggatattaaagacccagtttataacgagggcctagtttttcagagacctcttgggagcaggggtctgtttagatggactatgctaggttctttctagtagctagagtcaatggttttttttaattttattttttattagccaagacaatgaaacaaagggataccagtgtctaggtaattagtattgtggggttggtagatggtagaaagttgtgacagtttccttcacatggaaggaaaacaaggttgaaatatctagatcacttttcctcaacaattagaatttgaaactcacccttcactacaagtgaactgactgctaaggtgatgacttagaattatacagaaaagcgaggagctgggcaatttaacatcagacattgctcagcatacctactgaatacaccacagttgttctttaacatggagtttacatggtaaagttctgagtgaagcctcagccatttggggagatatggtcacagcaggagtgggtttggtttccactgtaccctgtagttcacacctaagcacctattttctagaatacacttgccatcaccacctgtacttaaaaaaaaaaaaaaaattcctgaggaagaaaagctagttctcagtagacctcaaagacttagatgtatgtggtcaccaacatcacagatccaaaggatatctgtggtaagctctttccctgtgaggagtatctgcttactgccagcattcagatatagcagaactatcataccaggactctgtgacacctaagaatccacgggaagggtgagggttgcttttatccatgagaagcctgtctgacaggatgaggctaagccgctcggcagaagcctgtactgaacagctactcatgttcttaaacagcagatcacaattaggccagagccagcttttgcagaacagatctggtaagttctaccaagacatatttgcactatagggactacatttctgatttacacaaatgggagaagattgtgtgtgcctcagaaaccatgaaatccgcctactttgcaaagacacatgtgacctatgaagtatgttaaggaagtgaaggtgtgttccaattctctttataataagcagcattctcagaggggcttaagcaacttcaggggaagcaaaactcagaatgaagaatactgtagtacaaaagtatggccaaaaatactgtatttttaaccagtagatcattggggcattattatacaacattaggtgtttttctttttttttttttttgcaaaactagttcccatccccaaacaatagacaatacatgcatttgaatgacattttaagaacagtaaatatgatttttttaaatactgcaagttaaaaatgtttttgacaaaactccctaagtacacagatctagtcagggcttccaacatgagggtggatgcggagcgtccggccagaggctgcaattacagtcctttgaggaaatctgccagaaatgtgtttcaatgaaagtgacctagacaaacttacacagtgtttttccactttctttcctacccctagaaatagctccatgaacaatcttcctgtattttcttcctctcaaagcttctatgaaagccagaattcctttatctatgcaagatccaattttacaaaagggctgtttttgtaacatgtaattagtttgggttcaaattttagggagatggaagtccatggcagatatgaaaaggaggtacataatgcctgaacatctactgtgcatcaggtgtgtatgcttactctgaacagatgattctagaagcaagaacactatggaagggtggtggtggtggggacacagcaggagacagcattactgtgacaaagacgggagtggagaggctcagcaagctatctgtgggatggcaggtgtctggcttcccaaacctctgcagcatcacacacaaccaagctgtttatttcttcttgttgtctagaacccaaatggaatcccaaagacacaagtaccagggcatctagtaacactgcatatgctggaagtgtgcaaagacagataagcacacattattaacttccatatttgtgtttctaaccaaagatttctctttggaataaaatattccatacaaaataaaacgtacacccaagcacaccttatttgtatcaactgagatgctgttaattaccacttgagtggcttgaaacccttatttaattttaagaagagcagcaatatacattacaatatttgggtacactttatttttatatgggttaacattctgctatatttcacttcattcgttcttttgagaaactgaaaagaaaggggcatcgggttcatctgaaggggtctgaggaatctccaaccgagatctgagtcttgcaatatcttataatgcagccctttcttcccattattatttttattttttttgcaaataatcaagtcattttgacccaaatccagcataaacagcttttcaccaattccgacttaagacaactaaaatttacaatcatgtggcagtataaatttttaaattacaattcgtacaacttgacaatcaatagaagtctgaagtacaaaaagtaaattgccctttggctgaattaccttttaaaactattaggcctgctaatgtaatctaaattaaacaaaacaaaaacaaaaccctcaagcccccatgttccaggtgttctttacatgtcgcctgtggatgccacctgccagtaaacgacatatgcaggctcctaagaagaatttgccagctactcaggacactcaacagagctcttcctaaggaaacccaacaggttctacgggacttactgacttttgtgtgggtctgttttttccctttatttcagatatgaggcacagacttctgaattaagctctgtaaggcataatataaccctccatttacaaataggaattctccgtgggtgacatcatctgtaaacggcacactgtgatgtgctgagtgactcatgagatgggtgcttgacttggtctggtgaggaaaggtttctgtgttctgtgttttgcttctgaataagacatgcccaagtcaccataaaactcaccacaagcctccactgtctagagcatcaacaggagtcagtggcacagcttagagcgttgcaatcacaatagaagagagagcatgagtaaactttgtttttgtacaaaactgagaagcccttcccgcccctcaccccttcaataaaaccccaaacaagaaacaacaacagaaattatttttagcttcattgactagtgtggatacaattatgtgtctaggcatcactccggctagggtgatcaatgttttcctttcttaaaagaagggattctgtcatgcaccctaggatgagcagtgaagtcacaaacttcaattctgcatagcaagttccatctccaattcacaaagacaatgcagcgacgacagcgaccctttccctgctttgctcagcggctctgagcttgagatcaggatgactcaacgacatctactacggctctgttaaatagattagcatggtcccctaggactgtcaacacttatgatcctgtgatgaggttttttctatacactgtaggccatcaaatgttacttttttctttttctgcctttttctttttttctttttttttttttttttgttttgttttttgtttttttgttttttgctgcaccaaatttaaggttgccctttcaggcaagcagtggttgctagctgataaaacatctccttagtggatcacaatagcttctaaaactgcctttctaataaaggccaccagagaggtaatgctaaactgtgcatttgccaaataagaatatgaatcgtataaaagctcatattccaaccccaggtcaaatggcaaaaggtctacaaagttggtctctgtgtttgtataaaagctccgacggatgttgtgtatttgctatgaaattacctttgggtcttaggtcagcacacctctactcaggaatgtgcaaatgattttagacagcacaatgctagtaccgctctgtacgatagatagtaagggtttttttgtttgtttgtttcttcttttctaagtggaaaaaaatatccctagtcagaaataaactgacaaatttacattctcctctcttaaaaaagtaaataaaataacattattcaaaatgtgaattagctacaagacatacaatacaattacatagatacatatcgatacagcacattcaacctgccaaaaaattaatgattacaaagccagtatggatgctgcaatatcaagagagatgtatgtacaacgatcagaacattcataattgcactataacctacaggcagtctgttaattaaattacaggtgctttctagagcaagggaataaaaagtaagctgtgttgcttggggctgggagaataaagcatgagaacacttcattacgtgtcagcaatttcagtgctcatacggtaagctgttcactctctcccccctttgttattcaagaaaggtgattgatatggaagtttagactagtgccaaccactaatgagaccagcattgtggcctaacttcccggcagcctcagagcaatcacaatctacttaaatcacatagcaacgtgggctgcttgacaggctcactcacacatgttaagcactgtttgtatctgctgacaaattgcacatggagaattccaaacatctctcctagtatgatcattacataaatacatgcttgacagaacactgactggtgacttttggataaatccacaaatcttccttaagttcaagcgaccagttcaagaagaacctgaaagtggtaaaataagctcactttcccgccacgcccccccccccaatcaaaggttacaggataatgctatcaaccagtgttcttggcagactcactcaaactgaaagaaggtaaagagctaaaaacactggtgccagtagagagagatgaacagatctcatgacaaaccacaaagggtagttttttatactgctcatctggacactggcactgaccttaagggcaaagcaaagaacagaccatgagaagcagttctgttagcaactgtttggcaatgtgtgtttccggtcatctcactgtactgtcttaatgcttacattttgagacgctggcttttactgtttaaattaatttgttttttgtctcctaaaaatatggctttggcaacacatacccatagcaaaaattattttaaaattatggcccaaacacaaagggggcaggggggaaagaaagctggaaacaaacagagaatgaagaagctacaagagggctctggcagcagctgctggggaatgtagtgtctgttggcatatcatttggcatctgtggtttacagagagggtgagaacctacagagaaataaaagggagcaaggaagagaggaaggacatggcacacgggttgtagaagcaaggactcctttacagcctgtacccacactctgacttacagacattctctgaacaattcagctatggctgaaggtctgcaccccaaatgtatgactcttaatcatcaatgggcacccactgtcttagtccaagtgagacaagacaatatatatatatatatatatatatatatatatatatatatatatacatatatatgaatgtatgcattgaaaaaaaaaactagatgtgatgtgcatccagagatacatttaaaaccatagtagtaatacatacacgccttcagcagaaccactgttaaatgaagctgatgtaagacgacttcaatcgaatgacactgtcctgactgcatcactcgagaaagaaacttgaccaagaatggaactaggggaaaggccattgtaatattcgagaaaaaaaaaatcagcaggaagaagaaaaatcagttgtgttttggtctagaaaacgggatgaggaagaaggaaaggaatggggggagagagagagagaaagagagagagagagagagagagagagagagagaacagaaatgacatgagtgcttttatattgtgaatgactgaaaatttaaaatacattgagtcataaggtttgtctaaaaaagggaggagagagagagagagagagagagagagagagagagagagagagagggaggaaatgtgctgggactgtacttcagcattctgtttcctctgaatagtttaaataaaatcataatatttactacagctctgtggacactctcacagagtccagaacggcaataaattagtattatgcaaattgttttccacagaaacacagtccttcttggttatcttcaacagcccacagggaagggaagaatggtttctgggaggcacagttagaccagattgtactccttcaggttcagctgcaggatggtgtccttgacggcagcaaagacaaagcggatgttctcagtgtctgtggcgcatgtgaagtgcgagtagataattttgtcactgtcagggttcaggtccacgaacatcttcaggatgaattctcgagctgcctgggcatctctctggggtcctgtttgccaagagaggagaagcaaagtttatcatgtgatccactacacatttattcatgtgttcaatcagcacatactgtgtcatgccctatgtaaattaatctgtattccagatctgttaagtttactgtgtgccctggttttcactctcacccttacacagtgtttcttatgcttcatccattgctccctgatagttttatttagataaattagaaacttgtgatgggtagtgttaaatgtcaagttgtcatagtctagagtctcctgagaagggggcctgagttgaggggttgtctagatcaggtcaggacagggtcctgaactacacaacaagagaaaactacatggagcaagcaaggatgcgtttattctctttgttcttgcctatgggtgcagtatgactacctgcttgagctcctgctttgattttccccaaagatggactgttgtaacctggggcttataagccatacaccccttttctcccctaagttgctttttgttagggtattttattacagcaacagaaatgaaactaaaacacttcctgtccttgtttgctttctactgtggtgataaacaccaagaccataacaatctggggaggaaagggtttatttcagcttatgaataaaggcctggacaggaattcaaggcaggaatggaggcagaaactgaagcagaggccatggaggaacgctgattaccacagtattcctcatggctcgctcagtctgcttcttttttctttttctttgagacagggtttctctgtagctttggagactgtccttgaactatctctgtagaccaggctggccttaaactcacagagatcctcctgcctgtgcctcccgaatgctgggattaaagctctggtctctgtatcaatcattaataaaaaaaaaatgccctttgaacttgcttacaggccaatctgatggaggcattttctcaattaaggctctttttttcaagatgcctctagcatatgttaagctgatccccctaaaaaatcatcagcatgtttatataataattttgtagttgattctttaccaacactgaagcagtaaaagaaaaaacaaactacaccttgtcctaattaaaaaaaacttttgttatcaaagtacactatcaaatgaaaaatatgtacaatatcttatcaggtatttatatacctgataaggatttagcacctagaatatataaagatctcatatatatcaacaagaaagcaaacaacctgaataaaactggtcaaaagacttgaactgaccgtttttgcaaaagaaggtaacaaccaatgagcacataggatgcttaactctgatactcacttagggaatgccaagtgaaatcaggaagtagtcctcccatctactagcctggatgttatttaaaaagggataaaataaccttggcaacaggttaagtctccatctctgtctaccattggtaggcagacaaaatgggacatccactatggaaaacagttcagtgattcccatataatctagcaattcatgtaataggtggacacactccaaataaaggcatttcataggcaaatgtacagtaccattagtaaatagaagtgactgaactcatttgggtaagccaaaggtagttaatgaagtcctgaaagatggtataacatgtataaatctttaaaatacattctgaaatcaacatgctggacatagacaaatactgtgccacttgacttatctataggctatagagatagaaaattagagtaaagggatggcattcgagggggggtgggaggagggcaggcaatggggtgttactgcttagctggagtggtagatacattggcaatggctgcagagtttcataatgtaaattatgtcatgattacatgcttaagttataatttaaatgttctgtacattttatcacatttaaaaactaacaatatgacatgccctggatcatttctaattgtgtacagaatcaatcacatcatatatcaatcaaacagtttaacacttaaacagactctggcaagtgtgagttgaaagcttctaaactactgatttcaaaacaccatcacctctcaggtgctgagcaggtaccctgcacactgtgccacagcatgtctgcttctctccactgctgcaagtttacaccagtaagtggaagggtcacttttttttttcctgggcaagacctcccaagattgacaatgtgggtttgttccacataaatgaacactgctgaggcctaaccaccaattctaaggaccttagtccttagaattgagtcttaggcagataacttgaaaacgttcaaattaattccattacagatttgggctcataactgcatcccacatatccaggagctacaagaaagagctatgaagcagagtcctctcatttgtacaagtagtaagtagcaacaaggggttttgaggttttggtgactaaggctgccaacatgaaaagtgaaagagtgccattatttagatggtacatatgtgaaacatggttctgtccttagcagtgtactgtgaacttactggttccacagtagcaccaaacatttaaaacagagacaggcagggtatgagaaggctgccatttccccagctattattcttactctgtttgggaaggaaaagaccccaacttttttttgttctgcttattctatatagaatatcagaaatagatttgaggtcactgaagtgcactcgaagagtgctatggtttaggcataaattatgttatcggaacacacaggattacaaagaaataggtaaagccatcacagcgggcacagaattccagtctgtaggaacaattctgtagctcatgtggaagcagtcatttctctttctgaagagaaacacagaggtagcattcatctttgaaggaagacatttgcaaccgtgaaactgacagtatctaaataagtgtatcaccaaaactgttgtgtgctcaacagtttttccagtcttagctcatcttccaagggctttggatctcatcaaacaactttgtttggatctcatcaaacaacaaaatcattgcttttttaacttagctgtggccatattacctttggacattgtatgtccattacagaaggagaacagttaaaataatcttcaaattccaaagcatttacagtaaactcctctggtaaggaaattgcttgtaatgatgaggactcaggatgatactgcagaaagtggcagtcccgcaagaacctactcgagaaaagcaggaactgcagcacggccagacaccacacggctgtaggtgatcagctgggttcagggagcctctacttgctatttgtttgtatccaagcaggaaaacaggggcccatagagccactgctgtatatggtatagtcattttttccccccactgactctcaccacctctgcagaggaattgagcctgtcatctgggtgtatgagcaagtagtcatgtttatgtctcaggaaagtggttcttgctcctgttctcagacatgtgcttgcagaaatggcctgcttttggggattggggggggggtaagggagagaggcaggtacaccatatatagtcacttccttccacagcttcctcaggaacactgaggcaatctcaggcatttaacatttgcttctgggttagtgagaaaataggagcaaagaaaaaaagctgtttgggttaagacagtttttgttctattaaaatagccaggcaaacaggaaaatgtactttgagagatatgaacatgctgctaacaacaaaaaaagatcctgtctcaaaacagctggctgtatacccaatcatacatatgcattggagatgcaaacttcagctgttgagcatgccacatttcccttccttaagacagactgcatccaatacatacagcgcaaaaaggcacctaaaccttcatagaaaactatgaaaccaaagggatctttaatctccaaggagtcacatttcttagggagcttttggaggacaaaaccactgtggtgcagaagccttagatctcctttgtagtagtcattacatttataagtactttgggatgtggccctactctgtgctaggtattgtgccaagtcatttatccatgactccatcagtccttatcaatggaggaagaaactaagtagagttaaatttgtttaaggtaatagtcagtgatgggcagcacttggagatactcagtttgtactgtctggactatgacttggttggctctgtaagactaagactttcaggctttgcagatcatttaatgtctgtccacaacactcacttctgatgtggtggagagaacatagtcctagataaatgtgtgagctgcaatgacttctgcgtaacaacagatggcagcctttggcttggtttatctactgcaggtttaagctttataaacactgtgccctgcttgggagggctgggaggctagatgtagacccaattagtcaatacattttcctcaggatggtgatgtcctgtcattcagaactatacagtatacctgggagatctactttttgatggtggcaacagtgcaaggccaagttcaagtgagtgctgcagaccctaagtgctccagcaagtgtgcttaaacaatcaccatcactaaggatgggggacatccctttccaatacctcacttggacatcaatcctaggacttttcctagtgaagttctcccaaattaaatgctgcctggatattcaagtacaacattaatgtcatccatttgttttccactggcctacaaagcagatctcatagctatggcttgaaggatcagaaaaatcaagggactctaaaaataatcctagaaatagggagggcctagactaggatttgaacttcagtgtatgtagtggtttgaatgagaatgtccttcatagactggtatatttcaacacttggtccccagttggcttgctgcattggcaagtttaagagatgtggcttgctgtaggaagtaagacactgggggagggctttgagagttaagtcttgcttcacatctgattctttttgctttggtgtgctttttaaagatagatgtgctctcatttcccccctccggccatcatgcctgaagcttgctgccatgcttccccatcatgatggactgactgtaccttctctaagttccttgctcatggttaacaacagaagtaactaatgcagtatactgacttcagaggtgagctccttaccagaaagaggcaggggtgggtaacaaaataaaagatacggaaactggacattatagcggctaacagagaaagctaccaaattatttagtctctgagcttgttattttgaaacaactgagaacttgttgctttccccgtaacttttaacattaaggataaattgttttatatcattaaaagtcagggaacagtaatttgtattctatcatgcctgccaccatggaccatgtggctccaggcactgagccatgctgcctctaggtcccataggctcatggatccaggcactacaccatgctgcttttagcctctacggggcccagggctccaagtacttgaccatgctgcctctcacccccataggctcatggctctgggcactgcactagtattaacagcacaatccttctcagctgtgaggctggtagaaagtgtccacttaccatcatattctgggaagtagtcgactaggtgggaatacataattttctcctctagaagatctttcttgtttaagaacagaataacagaggaattctggaaccagggatatgtgataattgttctaaagagtgctttgctctcctccattcggttctggggaaaaagaaaatcagaaaacaaagagtgaattactgatgattcaactggtcaactggctgatttcttaagtccaacccatcttctgtgtgcttccgatttttaaagcctgagttgtaactgtcaggatttatatgtgaatgattcacggcacaggttgactgttttcattaagccaactctcaggtcaacacgcagaaaagatcagtaataaaattacctgctgagccgggcattggtggcgcacacctttaatcccagtactcgggaggcagaggcaggcggatctctgtgagttcgaggccagcccggtctccagagtgagtgccaggataggctccaaagctacacagagaaaccctgtctcaaaacaaacaaacaaacaaaacaaccccgctgaaataacttcttaggtttgaaaagaaactaatcacagcctagatgacaaggctgtatgtgacatactacaatacatttccaccaaaaatgtccattcataatcaaatacttaagatatgaattaagctcaaatgccagacttcactttgtattttctaaactatatttacttggagcttcactatgctttaagcattcaaatcaaagtgacttagttgtccctaggcatatctagagtaccaccacaatgatgcagatgcacacatacacacctggggccactactgttctttggtgcactttctccatgtttcactatatgcacatctacacaactatgtataaaacaaagtaccaagccagaaataaagcctacttttttttttttctttaaagacatgatctcacctgtattcttggctggcctagaactatgtagactgtactgccttgaactcacaaagatctacctgtttctgctttccccagtgttggatttaaaggcatgtatcaccctgtcaggcaaaaaaaaaaaaaaaaaaaaaaaaaaaaaaaaaaaaaacagtacttcttcctcagcacttgtaagtgtgcctacccagggcaacactttcaagcttactttggtgacagaaaccctaatggttcctcaagagattaagccagcatatttgcatacacaaaaatgccaatggagggcaaccctgagtcaagtcaccccctatacaaatcggcaaaacagcgcagaaccaaacagcttctttctcaaccagcttctgctctcacactagtgtgtatgtgtgtgttcacatgttatggcatagcacatgtgtataggtcagagacaacactttacactgtgtggtggggaggctggtggcaacctgtgaagttctaacaagctgtctggtggctttcaaagaagcatcatctaaagggtgggtatagccctttgtgagtactggtaagcccattcgttagaaagattttcttctgtcctccccgttctccagtggaggctgctgggttcccagggaagagtttgtactgggtctttcctgctctgcatcccttgtctgcctttaggcaggcagctaaaccctaggctgctgaaaggagcaccaggtgcctccctcaagtgtgagctgagccccctggttccagtgggtctgtggagagaaagtcccataccacgcctccaggagggctgctaggacaagctctcctgagcccagcactgggtccctgagatgacctgcttagagcggttactctacttaggtctattgctcttaggccacactgacagcagagcctcaggcccaggtcaagtggccttcctcaatcccacgttctcctctggacctctgggtcttactccctctctcatgaggcacttgtgcttgtgacacagcccctgcctggaacagaaggtggaatctataccagtgcaggactcctgtcctcatgggagacggggtcacacaggaaggaagagcgaggcagacaagatcaagcgggaaggtggttttgcgtcgatgcttgacagaatgagggactgtaaagagcaaaagtaagggaaacgcaaactccaaaatcattcctccggagttctggaacttgtgcactaaataagaaaatcctctgttttgggtaccggacacatttcctccttatttgcattgtgtaccgggggcaaggatggtgcaaacatggtaggttctatgaagaacacacaattctctaaggatccaaaagtaaccactgtgattgcagcctgcctgtctccaacactggggtcctgtggggccacttaggtgcagcacaccaaaaaaacttccttttggcttaggtgcaagcatccttctcacccaggaaaaggccagggcatgttcacagggccctagactccacttagaagtttgttttctgcaggctggagtctggtcccagtctgcatagttactggagggcctaacacgatggtatcttatgtcagtccactttatggctctactgctcacaggcaaaggctatattttcctattcctcttcaacaagttggtgcttccctctgtccagacaacattaaactaaaggtttgtataacttgttcagtagccttttcatctcattgttctgttactaaaacacacgtgatctttcacacagaattgtttttatagttttggttgtaagcctggcctttaatcatctctccagccccagagttgtttttaaacaaaatataccaaacaaataacaagttgacaaaaagatccttaactctttatttacctgatacatatctgtaggaagagaatacattcctgagtgaatgtgtgttgacatgcgcatcaccatgtcagggactctagtgtctcatccctatagcaatggcaaagccttcactaggtgatgctcagaaggatagcaaagtcttccttgggtctgtaagagaatgttgacagtgtgtggagaaaatgtacatcgtagctttctcctggatgtttgtggccctaagactgctcctgtgacgattagctgaaccagcctccttgttcagctgctctcaataacccaccaccctgttacctgtgtatcttttttattttttttttggttttttgagacaggatttctctgtgtagctttggagcctatcctggcactcactctggagaccaggctggcctcgaactcacagagatccgcctgcctctgcctcccgagtgctgggatcttaaacagagcttctgtgcattgcagcttctccacctgagcatgcagaccaccgactctggtatcccagcttttcccagcttttctacgtctggtgtttgtctttccttcattccctacctgcaccagtcaggtcaaggatgtggcataagtcacctgattgactccctcatattctgtccattttagtagttcaacaaatcatactgaattatataattcacataggtaccagaatcgtgcttttaaatacaaaactggatgcttagaaaacaaacacagaaaatcagatcccctcattcctgagggctgatagtcatctgtgaggtgtttacagctgaggtctactgctagaggaccaacagatccccaagaaacctaatgaagctttctaggatacagtgatgctttgcactatctggaaatcataagggtaagtggtccacagcatcacctcctgatgccagaagcagacagatggatgtgactctgtttcccatactttccattagaaaagaacatcatggccttctaaatgaacaaggtgagacagacaagcagagtgtgcctgcatttgggatcatgtgtagatgatcatgtgtaagtctagcaagtgaaaagatttcactggctcctttgcagtcagatatttaaagtaaacaaacggcctcacaaagaggtcctgacatatggtagcacactcaactgctaagaactgcaatgtcacccaggcctcttactactttctcttaccacaggcagagaaaggatgcttctcaaaattctccacatgtttgagtggatatcttcaaaaaatgtcagaaaatgctcaaatcccaacccagacaaaatcaactagacaacagacacattacataagtgaagaagtcaggacaagaaataattaggttccttagccacccctcccttttctgctacccaaatcagacgagaggggtaggaaggacaggacaccaaacccaggtggatacacactgattcctcagcgatttccctagtctttgcaaatctctgtaagcaactatttgagaacaaatttggtgtgtgctccgggcttgaagactgctccaaaaagttttcatattatggcaactttgtatgtgtgccagcacactctgccacccaggatgtgtagagaggcaaagggacacgagacatttgcctattacctcaaggtccaaggctttaggcagacatgaggtcacagatggggcccctgtgacatgtggcatgtcagtgtactgcaggagaaaagcagggggaggaagggttttggagggacagtcaggtcaaggagagacaaaggagagcaggatacaaaagaagaaactggaaaaatctgcaactttctctggtgcatatgtgcagtcctggaactcagacagaccacctcccatttacaattttctggcattctagttcagccacagccttctttcaaagtctaatttacaacacattggtctttcaatttagcagtcacatatcctgcctttttaagctgacatgtcagtgagctaaagccttttttttttttttttttgtttttttgttttttttttaggggggcatttctagataaggcttctctgtgtaacagtcctggaacaggctggtcttgaactcacagagatccacctgtctctgcttctcaagtgcggagttaaaggtgtgtgccaccacagcccagcattaatgtctacacgaagctcctgttttctcctaacactctactagagtggcttcaaagctttaacatcccatgtacacatgacactgacttttcagttcactgaccttccctcctagcctactattttccctcaacagcttctctgtatcaccaccttaggacagttttgttggaaaactccttcctttctctcaggtgtaattgtgtttcataatccaaacaactgccccccactacttttacaatactctgtggttatgcttcaaaattaaatcctgggcactatgtcaccagtataacttcttgcctccactacatttccagcagtctgtattctctgatcaggactgggtgcttcttacagtctatgtttattgatgaccagagcatcccatattttaagcctctgagttgatagctacagattctgtttctagggtactaatgtgaaaagtcatacatttcaccccacgaagatgaagacagacctccagaatttagtcagaacaacaccttattcatcgttctaacctatcagaaattctttgagtctccattcatataaaagatacctcagcaaccactaagtgtctaaggatgctgccctgaaccagttagcaaagaaccaagggaacaactgtggacctatatatacaatgtgattacttgaagaggtgaactctaatcttgaagcacagtggattcattagtactggctgtgccaagaaaccagactgatttggctggaaagtatctgctgccattcaatcctagatgatctgcctgaaaaatatctcacttgcttaaatccaaacctctttgctagatttagctagaaccagactgaaatgaactcagatcaaaacaatgaggatgaaaatacaggtgtctggaaagctcagtgattcttcttttccttgagcaggagggagacaaaatgagttctccatgcttctcccaccagggtaccaagttagtgtaccatcctctgcagacagcctactggaactgtgctaaacaacaaacagaggaaatcaactgaaattagcaacgtctgacgacaccagcaagtcatcagcctctcgatgagctttctgcaagaggtaaaaccagcttatacgacccaggcgtgtgtgaatgtgtgtatctcaccgctccctctaggaggacttccacccatcccttcctcatcctttcctgtcaaagcacagcgggtgtgcaatgccagatcggatgatgttcacagtgaaaaagcaacagccaggtttatggctctagcagtatggcttacttgcagtgtctcctagttctgtgatgtttgctctttcctgttctgtttgcattctcttatgctggagtcatcttaagttttcttattagtttgtcaatttgcacattaggtgttaaattatttagagaagtattaagattgaagcacctcacctcagcactgctaggcctctctgactaggaagcagtcccactttattgcaaaactttgtttcccaatgggccaccctcaaagtcagctcagtttccttttggtaaactagctggggtatgtagccacagcagactgtgaaagacttcctgctgttacctgtgctgacaagcagcaaagtgggcccaagtactagcttccttgctttgtttttcttcctgactctttgggtgatggatgagaagtaacttggccaagctgtttgagattttgtataggggagttagaaataggtttcaagaatatgtagacaaaggattacagagaacatgcttgagtcagaaactctgggtagcttgaaagggacataaatgaccaaccacagaaatatcagaacttgaggctgagccggacacaatttttacattcatggtttactgccctgggacagtctaagtttgggaaaataaaggtgaaatagctggaagtaatttagtacagcatttgttttaatgtcacaaaatgcttttacagatatgtcatcatggttcagaaatgtgattggcttgctctttggctagtagtataagtaatatcagtagggtagaaatttgacttgccttgtgtccagagataaatcttaagaatttatatgggtgacatctttgtacattcctgtgtgtgaatgtgagcatacacatggaagtcagaggacaactctagggtagtcagtccttgcctagagggttctcttgtctttatctcccatctacctgggagtgctgggattgcagacaggtgctgcccatctggctgacaggagctgcacatgtggctttatgtaagttctggcatttgaactccacatgcttttgcagcatcctctgagctgcacattggggtagcactgggcctgattcatccatcactgcccacttaagttcttttcattcactctggctctcttgtcctttcttatactctctgcagactgcaagcacatgactataatttccacagaggaacagacaggaagtaaaaagtgataaataaaataaggaatgagagtaagtttggcactgaaagacagaggctgcagataaatagatcaaacaagaacaccaagaaggaaggaggtacaaacccattggcttaaagtttttcaaaagaatacataaaatatgctgaataaaagtccttttaactgagtttggcatgtcatattcctaaggttgtatttctgtacaataatgacttgatagagtaggatctatacagttagagatggggctagatttgtcctaaggagccacagaccactaacccttgttatatgcacaacagcatgaaatttgttttaaagttatttattttcatttttttgtatatgactgttttgcctgagtctatgtctgtgcgcaacatgcatgtagtgccccaggaagccagtgttagatcctttggagctggagttacagatagctgtaaactaccatgaaggtgatgggaactgaactgtgtattccactagagcaaccagtgctctcaactgtgaggcatctcgctttcacactaattttccaagtgaagagactgataaaagaacaagttaagaaatatatctaaagccagagaaacggcttagagggtaatcagtaggctactaagcctgatactcttgagtttgaccctaggacccacaagatggaaggagaaaaatgatgcctgtaaattattttctgacctctatatacttgctgggatccacacacacacacacacacacacacacacacacacacacacacacacacacaataaataaacaaatgtgaaaagagagaaaaatatttagcaagaaaatactttgaatcactggcaacattaatttgggctaatttactaagaattcatgcttaggagatttataatgtataacaaagcacatgcatatagaaaaaaaagctaaaattaaacccttcttatacatgtcataaaatctttgaggcttaactttattgtcttctactttataatcacccgtagagtttctttttttcttttttggacacagggtttctctgtgtagctttggagactgtcctggaaattgccctgttcactaggctggccttgaactctgagattctcctgcctctgcctcccgagtgctgggttcaaaggcatggaccaccactgcctggctctaattttctctttctttgaaggaaaaaaacctacattctttaaaagagttataaattctttttaatttttaatctcagagcactgtgtttatttagagattgcacacatgaaaaaaaaaaaaccttcccagatgttataacccactcatgtggcattaaattagtaacattattgtgaaatagtccttatgtaaagatgaagacatacttttcacactgcctgaagttgctttaaaaaagtttacactggctgggagatgacaccatggggaaagtgcctgacatgtgcatgttaagacttgagttcagattcctagaacctatgtaaagctgggcatggttgtatgtatctgtaattccagtgtgcctaccattcatgggtgcatgcatgcatgcacgcacatggtaattctacaaccgtgtcagtcaatgagagactagtaataatctatgcgtggattcaccctgtccccattcaactcctctatttttctgtaccactggctaagagaatgaagggacgggggaacaatattacaactcaagccacttacccgtggtacccactgaacagtacgctggtggtattcgggatgaactgtgactagaggcctgcatccctcattgacctgtaggtccagggcttttttctctgtccttattctgtcagtgctgtcattttgacagtgcaaagccccagtggcatcattaaccaccatgcttacatctgtttaaaaagtcagtgtctttaatttcatttacatgtagtcttggtataaaacaatattatctgaaacctctccattgtttcactatgttctgcattaacaaactttgaaaagtagtgcacattatttttctttaaactccaggataatatataatgtccacatgacagtaattaatatgaaaggtggggaaagtgtcacaaacattttcagaaactaagtacccttagaccaaaaacaaaacaaacaaacaaaagaactaagtatgcccacaaaaagctaaaaacatattacaaagtgtcaatttttttggggggaggggtggtttcaagacagggcttctctgtaatagtcctccctgtcctgaaacttaactttgtagaccaggctggctttgaacttactgagatccacttgcctctgcttcctgagtgctaagattaaagacatgggccaccactgtcaggccaaaatgttggcttttaaaatttaaacatttttctcttttgctttttgtcatgagaaaaatgtactgaatttgatttttcaaggttttaaataaaatatgttttctaaaacatgtgaaaaaggaccttattatttaattgggaagtcagaaaaaaatcaaaacaaaataacaagaaaacccaaacaaatctagaatattaacgctttacttggcacaaacacctgggctctggatgatccaaaggagcgcagatcttttcgaagctaagagtcaagagctaagacatctgagatagtgcaatgcaaataaggacctatagatcagccaacagaaacagaaaaaaattcacaaaacaggttcctctagtcttggaagggagggcatagggagagaatagaatggaggatcaattaacatcaaaaaaggtttgaaagaaaacatgagtatacaagtaaacagcagtgatttaccagggaaatacgtgagcaaaagatagaggggctggggtggaggcagctagctcagtggtagcttgcacaaggccttggctacaatcaatatcacagtacgtacacacacacacacacacacacactgacaccaaaaaacaaaacagaaaaccaatgcgcaaactctgattatattaagtgccactacaaggagccagtaagtatatggtttatatcactaaaaagcctttgagatttaaaatctctgggggtagggctggggaaatggctcagcatttaagagcacttgctgcttttgcagaggtctgggagtttggttcccataattcatgtctggcaactcagaacttcctgtaactccagctccaggggattcaacaccctcttctggcctctttgggtaccagcattcccaagtgccatgggatgaagtaacttaagttatccagacaatataaatgggtggaggagtatctaacttacaagtacagatgtgaaactatggtatttctacgatagagcaaaatgataaagaaaaacagaaaatattaaatgaaaatgccttataattaaatctttatgctgaagttgccctgaaacctagagggagggagggagattgattgtatgctcatgcactgtgacactgattgcagtcaggaccttgcacagctatcactgatccagctcccccctccccagcccttctctgatttttttttgctcaggtatttaccaggtaagtatgcatttgggggagtgacagtgatgagagaaggtctgtgccacaaaagatcatcctttaaaagtcagaattatcaggttagacaacattataaaaccttcaacagaaaacaagcaatgtaatgagcagaagaattgtggaccctgaaagggaacactggccaacaggagaataccactttcacaatgtttcatatctgaaaatgatatagctaaccaaaatatcaattatgcttgagggcagaatatgtacacagttatacagatgggatttcaattcttgcaaaggtcctttggatctttactcaggaaacttcaggaggacgtggcagaccaaaataaaacattaaatcaaaaaggaagacaatatagaatctgagagttaggaactcaagacacgaaaggggctgaatgaattttaaggctgacaatgaagtgagggatcaggaggatagcttgtagagtggaaccttaggtttgaaatgacatggtttcaaagtcagtgttattttctttcccctacttagccatggtgacaatatcaatccttaaggaattaagaaactgtcattattcaaaatatagagagcaagtgaagttctgtatgaatgtgtgttgacagaggcatggcctcagctcgataaaaaagtcaaagtcttcctcaggcagctcagaggtatggtgacttcctctggtccaagtgggtatgttgatagcgtgggcagaaagtgaccaccatagctttcttccccaggccggaagactacccccagacccctgcccatcatgctcccacctagattagctaaccctgcctccttgttaagctgtatagaataaccctgccatcttcatgatgaacttctgggggctgtggcttctccagcaagagcccagatcacctgtgtgtttgtttttatttcattcccttgccgcccctgtcgagtccccaagcctgtgcaagagcaaggcacaaaatatgcaatgctagtgaagatacctcaagcttagatgcacaggatcatgtactgtagtgagagatgcttaagagaacccagctgttagccagccaagtcttttctgtctctgttccagtttcccggttatgagtaccatcccacttccccataagatgaaagacaattctggtgacagacataataataagagtcaatatctcaactattttttttaacgaaatacatcagtatttacctgttcacttagacctgcatctcactgcaactgaagcagcatctttttctaaagctgttgaagggaccagctccctatttcggcagccatgacagtaacacgtgtttgccatgaccttgtcctagtcactagaagtcagatgccagcctcgtggcaaggaaccaatcagaagttagctggtggcgctatgctttactgctctgggtgtgctttatggacaagtgcacagcaatgacgcccagagcatagcgaccaccctgggagggcctatgggccataacaaccagttgaccaatcaacacagggcaagtcctccaagcctggaggcacaccaatcctgagcctgtgtgtacccctagacactccccttacgctgccctacaagatctctctgcagcccctttgagcggtctttgctggctgtccgccatggcgggtgggtgaaagacctgagctaacatggggttagctcgttaaacagcaataaagcctcatgcagtttgcagcaagctttcgaatctgcctggtgattggggtgaccaccgtcctgggctgggactccggaggcctgagttttccgggggtctaacactgtcatttcaagagactgacaatctaaatcgcaggcaatgagaaaacagtcaatggcttaggctttcctaaaatgaccttggatgtgtcaatagatttaccactgttctgggaaacggagacagcaattataatgttcattcctccagttagcttttaagggagagacctttggagagtcttattcctacagtatgctctacagtagtaaatgtgaggcacaaactacttcccattaaacacccatagagggtgacaagagtgggccagtgaagatgggacatttcaccccagggattcttggctacaagttccctttctgagtaatggagcactttcaaagtaaacaggctttaaacatgtaggaggttgttctcgttttctttttttttcattgtgtaggtcttccaggaaggtataaagatctgtggatgcttgaactatagaaaatggtacagtagctttcatctaacttgtacatcatgtattttaaataacccccagggcaactgtatcagttaatacaatataaatgctatgtgaacagtcactgaaggaatagtagcaagaacaggcctgcatatgaagacccctttttattattaaatattttccaaatgtgctgggtgaatgtagataaggaccttgcttatggaaggctgaatgtacttagataaaagttatgacaaatgctaatatttttctcttgtcactagcacagggcttacaggtcaatagctgttggtttaactgtactgcatacaaagtaaacatacatacattgacatttctctaaaacagtgttttctaaaccattgattatagtaaaacatagtctctatagtgaagggaccaactctccgttttggcagccacaacagcctaacatgtgcttgcctgaccttgccttgatcaccaggaggtcagatgcctgcctcgtagcaaggaaccaatcagaagttagctggtggtggtatgctttacggctctgggtgtgctttacggacaagtgcacagcaatgacgtgcagagcatagcaaccaccctgggagggcctatgggccataacaaccagttgaccaggttgttcaacacagggcaagtcctccaagcctggaggcacaccaatcctgagcctgtgtgtatccctagacactccccttatgctgtcctataagatctttgtcccggcgtttctcagggtcttttcccagtcatctgccatagtggatggaagaaaggcccgagctaatggggttagcttattaaacaactgtaaataaagcctctttcagtttgcatccagtcctcacctctgcctgatgactgggtggggtcgctgcatttgtgagtgatcaacctggggtctcaccctgtgtgtgtgtgtgtgggtctttcaatagcagcccagactgacagaaacatacaggcacatggatgaaagcagtttcacaaaaacaatacttgtttgtgcaatatgtcacacactctattttactcaatttcattttgttccccacagatattaaatgcagccatgtgcattggaaagacttatttagcaagccccattgaattgactttatgccagacattgagaggtgtaactttaatccctgcacttagaagactgaggcttaaactgtgccttcaaggtcaatctagcctatgtagcaagtccacagcacaaaaccaagtatttattacagggctctaggttcaattcctagcagtacaagaaaaataaaaataatctggcaatccttctcttctatccattttaagattcccaacaatgttaattatactgactcttgtatttgttttaagattatgggctagatacctagccctttaaaatataaaatataaaacccaacaaactagtctacagccataccaccctgaacgtgcctgatctcatctgatcttggaagctcatccgggttgagcctggctagcttggatgagagacaccctgggaataccgggtactataggcttaaaaaaagccaacaaaccaaactaacctgccaatgcagctttacttaattggcaaatggaagagttctaataataaacaaacaaacaaacaaacaaacaaataaataaataaagagggttttgtgattgtagtacaacccttgttgtcagtagtcgttttcatgctaccatctttagataaagacactgtgagtcagtcaaggtcatttccaagatggcatacaaaaactgaccccatcacccttattctacctgagaatgtctgtaatttcttatattgtcttcacctctacctttctggatgccctcccagtcatcaaactggaaaaacaacccattcgtcttctgaaatcatgactgtgactgtccattaatctccgcacagtttttcagagtgttaagttagttctctcccaacacccaagcatcagccttggggtggagtaaacagtgttttgctgtggagtgaatgcacattccaggagagtgaaaaggacatggatctaaataaccagggaggtactgcagcatgcaggtggacatagtgcagctgtcacctgcacagcgactcagcagtagtgagtgactgagcactggcccgagtgcagccctcacagtgctttggctttgcaagttcttctcatttagcacgttcctttcatggttttaagagcaacacccatgtacgggtgatggagtcacgcttagtgatcaaaggtgactgaaggagccagcggtatctcaagttagtagccagcatggggtcagtgatagcctactttccccaaacttctaacacttaattctggaagacttccctggctctctttgtggttcagcccataatatgtgctattatcatattttctctgccaagaatgtcaaaagagtagaaatgccctaggctggtgtggtggtttggatgagaatggcccagtaggtgtatctattataatacttggtctccagttgatggaactgcctgggaaggattaggaggtagctttgttggagaagctgtgtccctgggggtgggctttgatattctcagtgtctccccatcacatgcttgcggatcaaatatgaatgctctagccagcatgccttctgcttgctgccacgccttcccgccattaacacttaaatttccggaactgtaaggccaaatatgtcctttcttctataagttgtcttggtcatggtgtttgatcacaacaacagaagagtaatggcaatctgttaaaccaatatcagtgctcagccatcatcagagaagcgtcctctgcagtggatgggaacaaatacagagacccacaactggacaatgtgcagagggagagaccttgcaacactcagtcctaaatgggatgctgtcgtctaatgtctcccacagggatcagggacctgtgtgggggaggaggtagagagattgcaagagcaagaggggatggaggacaccaaagaaagaacaccttctaaccacagcaggactgacgcatatatgatttcacaggaactgtggtagtatgcacagggccagcaaagatctaagcagatggggctctcaactttgagatggggaagtggatacaagcccactctaacccagaagctacctctaattgataatcactggcaaaggaaaaattagttttctctgatggaatgttactgggtatacaaaccacaattaaaggcagcccccgcccccaagtctagtagtagatggtatactcatggcattttgtaggttttctgtatcataatgctttgcctgggttttttgtttgttttttaaccttagaggtcttttacttatgtattatggctttggtgtttgggttcttatggaatttttttttgtgtgcatgaatgtgtgtgtatctatgtgtttcatgtactttttcttttgttctttttgtctgcttccttgttttgtattgttctggtttgttttattatcattacctctgatacttttttttttaatgtaagaaagggtatggagtcaggtagaggggggaggatctgggaggagttgtgggaggggaaaccaatttcagaatatatcatatgaaaaaatctatttttaaaaaataactaagatagatgggttgtgtggctttcctacttgaagacgtgaggcctcaagtgatcctgtatgaaaactcaacatgtatcaggcatgtaactagtaaaaagaacaagtagatgctatggatccccatgtaagcaacatacatacaatcttttaagatagctgagtttgtctcaaaaagcacagtgaagaaaagacctgaagtggttagctggtacatgcaaaaatttataatggggggtggagggcatttggggatggttgagctgaggcagcctgcaaagctatgctgctcccttgtggacacaagcagtagaccctgtaccagacaacagcttttccttcttggcaataaacaagacctttcacttcctgtaatttcaagttgatggctgttatatcaagacaactaggcagtgcagcaagaaagaggagcttcaaaagaaaccaccaaccaaccagccaaaaaaccaaatcacccaggtaaaattatattcactgtatcagaaactgtgccttgccaagggaaatgtacaaattaatctgaaaggaggaacaggtgtcctgaaaaatgctggctgcagatgtgttcaggctgagagatacacttgcctactaaagagagtgtggaaatgccttccttgaagttccagaatacataaagaaggcaggcagacctcactaaaaaattgaatccaaaccccttatatcacttgtaagtcaatcagtttgataggtatttctgtgtggagctgactttcaagcagctaacaaaccagaatatggtagagaggtctctgggtgagagtacagctaagattcctgataaaaaggacaaaagcgttcaaatttacaataaaaaagaaagacaaagctttgagaagattcagaccattgagtctctgtttcaggatctcgaatcactaaagagctcattcctatatgtgcaggaagtacagacactcagtaaatatttgctaaataaatgcaactgccagattgaaatggtttccctattcatctgaacagggattcctgctcccactcaagcatccaggagtggagctggctgaaggctcagtgtttctagatctaatctgtttataacaaacccatgtgcaacttacagaggctaaagcagatctgctctcaaactcaagaggtttttgtgaaaccaagactagaactcaatttctcatccttgctccaaggcttctttgtttccttgttgtgttagacctgttgtctcgtcagagcttgtagttctgaagtacttgtgcaaattcactgaattttcaattttgtctttaaaataaaagtgattttaaatctcggcaaatttctctatttgaaatcttctagggaagatttagttgcttttaccgaggatttttataaataaaagagtggctgcagctacctgatcttgaagtcacactgctcaggcacatgcttgtttttctgtgtagccataattgctgccctctcctccaacacacacacacacacacacacacacacacacacacacacacacacacacacacacacttgtaagttgtatagcgtcaatgacagaagtcactacagacattcctggaatatccgtgtacctgagttattagagagctcagacagtggaatacttaacaattttaaactgctttgcaaacttactgaatggaactacaatttcctactttgaagcaacaaaattaaaaataacaaacaaaaaatgactaaaaactcctgtcatgattttacctttaaatcactgtcttcttaggtattaagatttttatgttagagtgcagggaaatttttctcttgaaagcaaatcttgagcttttcctgaatcttcaacgggtggagaaccacagacaatagcaaatagctcaaaccagagaaagaaaaccacagctaaaaggggaccactatcatggatccagccagacttcatgcttctgatcagttgtggttttctcccaatggctggtgagctgtatgcagccatggcctaggcaatggggagcagggctcagggaagtgatgctgagccccagggcttccttaaaaaagaagctagttcccagctcttgaaggaactctgttttgggattcttggttacagcagctgagctttcttccccaggtaataattttctaaggaaaatgttgcttaggaagggaagggaatgatggtctcacttcccctccacagttctgaactcctctctgattctctgattcatttttattcttctttccaagggacctatccaactctacctccataaacctccattcccaccaggggctttcactgaatcttttcacagtgactccacagctggcctttctcttcgggctgcttgctaactaactgctctggcttcttcaccaaccaggttaaagcctagggtgtaaaggctaagctcatacctgtgaactcagaaaccagtctgagttggttagattttgggaaaacaaagacttgccataaaactgatcctgtgaaatggaacataagagttatgactcctaaggattacaacaatcacactggaagcacgttaccctctcttttaataggtgagggtctatcttcacaagcacaagaaacaaggctttaacttttaattattcgttttctcctttagacgactttagaatttctgcttccatgccaaccatttaaaatcaagctcagctctgtccccttgccattattaacacctgtggctggcacggccactcctcttactacagactgtatcatgtggcagagctagaagctgactggacccgtgcatgttcctcctttgtcaacacatgtcccaggaaaccatgcctttagtccccggataactcgtgcaaaggtcaaattagaacacaggcattttcttgctgtcagagtgagtgtcagaggcactggctgaacatgaccagcagaactgattgcagtgtgtgtggtgagtttgggagctcagaaaaggggaggggagctttggcctgccttcgtcttctttaactataatgtattgtgataacagcatattcgttgaatctattatagttgcctattccccagctcctcttttgtaagacagtggccttaccatttgtgactgtgccaactgacacactttctaggaaggtagttctaaatttggcaagagattactctactaggacagaccaaatgtgaagagatgccatttacatgcattacaaagcaaataaaagccaaacaggaccgagttaaatgaaggactctggaaacacagcagcagcttacttagggagctaggcgagaactgtgtagaagtcagtccatgactagtagggcaagttgcttcaggacacccacccaaatattccacagatgtgctatttctgtaccctctgcaacgtgttgccataaaacaactgcatttttgttagccggtttttatttttcgtggttgaaggcttacagattattggaaatgttcaatgttgacataccagtgaaagttgcaaagtttctaaaaacatgatttggtatgtcaatttcatctcatgccatgagtaatactgtgagtttccatctattttatgatcaaaagagggagaaagaggatgctcggaagcaagaaaggctgagcaagcaggtgtcaagctttcaggcaagagtttatatttaatgtgtctctcttcattcaaagagaaatgtaacaagtcatagaaatttagtgattaatgtgaaaattactagaaatctgtttactaatctgtatttgaggctctctcaacacagccacacagtaagtaccctgcatatgtgtgcagcttcctttctcaaaagacaacgctacatcaacagggcctccagtgcactccggactctctcagaggctagttattggtcaggagtggcaatgtggggagtgagaacaggtgctagaatgggaatataaaccctgaaccagactactatcagccctggaaagatggaaacacagcagctcacaaccttagggacaatttctatgtcaagtatcctgcagatgtgacaactttgtccaaattaaaataatggcttatctgtttgaataatttttttttttaaattggaacaacttgggaatttatcttcagctttatgaaaacattttatgtatagttagagcaccacctagtggacatttgggtaacctaaataatggccacatagtaaaaagtttcctttatagacgtgactataaaaaaaagaagcaaaatccaaaggtcaaaggacctgttcattctctttcatttcatatgaaaatatttttagtgtgactgagggttattaagtctattaactgctgacctgtaaaaatagtgacttaaaaattgatattatctttgaaatgtgagtatttgtaaattaagtatctattaaggattaatatctagaacttaaggaaaatttctacagctcaacaacaacaacaaaatatctacttaattaaaaatagacaaagaacttgcacaagctaagcacataaaaatgctcagtataactaatcagggaattgcaagagaaaaatcacaatgtgatataacttcttactcattaatgatggctatcattaaaaaaaaacaaacaaactaataactagtaagtgttggcaaggctgtagaggaaggtgaagagtcatactaatggaacataaaaatgatacagttactatggagacatagtagtttcttaagaaataaaaacaagaattactgtacaatccggtagttttatttctggatctgaaaagaactgaaagtaggaacttaaaaagtcaactgagctcaaagtaggaggccaaagaaggaagccactgaagcaaccactgacagatgaataaaactgatgcattcaaacaacggagtaagattccatttcaaacagcagtgagatgtacatggacacacagtacaccatgagtcatgaacaaactgtataaggtaaaataaactagtcagaaaaaaacaatcatgcatgattcgatttatcagagaaacctaggatagttatcttcacagataaagaggaaacgtgaatttattggctatgcttgtggggattcagtttgggaaaatgaagaagttctagaccatggtggtaacagctgcagagcaacgtgaatgttcactacttctgagctacacactacatttgaaagtggacaagagcaaatttcatttgtgacaactataaggatacttatcagtgtgaagtatgatttttctaaggtatgcattttctaaatttgtgtaagcgtgtacgtgcttgtgtgagggatgaacacatgtgtatggaggccagaggctgatggtgggtggcatcttctagccaaagctgctgctgaagaagaaaatatgtctttgttccctcccggctcttttatgtaatcctttccttcctccctctctcccttccttaattccttccttccttccttccttccttccttccttccttccttcggttttttgacacatggctttggaggctgtcctggaactagctcttgtagactaggctggtctcgaactcacagagacctgcctgcctctgccttctgagtgctgggattaaaggagtgtgctaccaatgcccagcttctccgtgttttctagatcacatatatcattagtttataagagacacaactcaaagaatggattgctcttggtaacgattgaggtgcccttaaaggggaaagtctacttgtaagaatcctggagaaaataaataacatctttgccccttgcggttttcaactaataatggaatctctctctctctctctctctctctctctctctctctctctcctgggtgtgtgtgtgtatgtgtgtgtgtgtgttggggtgggggtgggggtctgctttccttggagtctgacccagatgagagaaatgtgcttatttcttatgcaaatgcccagcctggtgtgctgtgggtatggaggctgctaaggtgttcaaacgcaggggtggttataaactgctttgtggtcagcagcagcagcacaagtgtctacatgaggaccacctggaggtgtcatacagaggggacatgatactcttgaaaagaattactgcttccagcaagcgcactatgctcctgtttggagcaagttactcaaggagtgagtccctctgagagtctacaaaaggctctcagttcatcaagcaagagtaacgcagacattttgttacagtaagtcctacccaatgcctttcttttccagatgttctccgctctcctgcatcttatataaagtaaatgctcaaaatttatttttcagatttctctatgaagctcgtagtgcagcctggtaaaatgggatgagaatattgacaactcagagaagtatttcttttctgttttaggaacaatttctatgtcaaagtggtctgttttcatttctatttttgcctagcctagcacttaatcaaggtagttaaatcttgaagttatacagcccacccactctcatctgtccctcctgcatgggaccctggagagaattcctgcatgtggagaattcattgaattttaatgctttgaagatggagcttttatgcttgggccctggataaataacaaacttttaggagagactgtttttatcttcctggatcaggaattatcatcatcacattataataatcacttatgtaacatcaatgatgtgccattgaccgtctgtcctgagtatttcatgtgtttagacctttattatatcccaaatacagctgaataaacaggcccaaacagcagatggcagctgatctggggtcttccattcatgaagtaactactgcttactgttatggtggaagtttcaccccagttgccagcatccatatataccccaagagtctgggatgttatgatggaagttctacccaagcccccttccctatctctctccaaaccctgctgcatctcagaaggcctgccaaatgatgaaccctcccctagagatgctcgagaccactcccacagggtatttaaactgttccccagaaaacagactcatggttttccagtcgctctttcccatttcctccctggggactggaaggccatccaagagcattgtatccactaaacctgggtctattctaatttggtttcatttggtctgatttggattgatgaattagtggagaggcttatcggggtgcagaaacttttcacttacaattgcccctttagaatttgaggcatttttttctgcattgtaaatggaaaaaagaacactgaataattaaggaaaagctctaagggtctacagggctcaaattctctactgtgaagcagtaccatggcaggggatccatatagatgctcccatgcctggaccatggcaaatgctcaacagatagaaagccttggagccttctcatgccatgtgcaactcaatgccaggaaagtctttcccttagcctgctaatgagcaataggctgcagaacccacaccgggcctgggacctgcagtcagagtgccagaggctatcctctcctgccactagctgcttcatacctgtagtttctctgtagcacagccaccagttaaagtcaatggcccttaaaccagcagaacatccatcagagtaaagggtcacctttattctaactaatgttttctgaagaagcccacccctagacttgcaggctaggaacttattctaccagttctgcttcagtgcccttttaaacctctttgacagccttgagccaaatgatcatcttgaggcatgtatcataagtgaacagctcgtctcagactagtccaagtgaaaaacttatggtactggcatcataaagacattttgcaaaacattcttaatttagtctagtgaagctctgagtggagtttctgactggggtaacccttcagtgaatttcctgcttatagcaactgcaatgaaaataccagcttcctcctatgggtgcctcctccctgccagtgatatgggtctgggacccaagctccagggaggaaccaactttctggtccctgaattctgcgggaccagcacccacactgaacagttcagcaatgtacctgacaaacatgctacaaagggtgggggtggagggcaggtattggagaaagggaacttggacagctaactccactcagcacgtgtggagtatgtatgttccaggagggaagcccagaaaaggtgcctgacctctaccctactgacagagtcactgaaagagaacacaggatgtaatagctccaggaagagctatcctcattggaataaaagataggcagacagggtcctgtctagtggggacagtgtgtctgggtaataacatgccaacaagtgccagctttggctcataaacaaactacggaagggaactgagcagccatagcatacgttaagatgttccatggtagctttagaaactggcatatggtctgaatatcaagaacttaaagtaacctgagggcttaaagtttctgtgtgaatttataaacaaggattagctttagaacttagctctaactctttaagaaggcttgcattggttgaatgaagagacagcatctaatgacagagactagtttattggttaacagcgaaaagaatgattttcatccagttacacagtagctcactcattatgtgcccaacaccttgagggtttgtggaaggacaggcaaccgtgtcacttccccaatgcaagatgccccaaataatacgtcccaagcaaagctgagacagggatcagtcaagttctacaaagccggcagcttgttttgggttcacagcaagccttgggcagaaaagctcctccttcggcactgtttcatttgcttctctccctctggaagcagccctactttagtataaactggcttctgaaattctaaaccatgcatcttttagccagaggctccaacacttcaagtttttctcttggtctgacaagtctaaagcaagtccttgagcaacaaccccaccccaaactagcagcatgggggcctctggccactttccagaacactgaattaaaactgaacaaaggaaaagggttactcatgtttatgtctctgcaaaatgactcttactgagtactggcaattatcgcaaaacagataaaacaggccatctcagatccagctcttcataccttccaagctgtgtttggggtgggcatgtgaaaccatcatcccagctcaatgggcagaactacggtgaggggtaaaggaggcacagatgggcattatgttggaagtgcttagattccatgctgtcttttgccagcaagctatttaagagatgtggaggtagtgaggagatggcagaaatggagtgtatattaagctaccagtcagaactgccatggctcaatgacgggttctaaatgttctcattgaatataccatcccagtaccataggagaagccagttgcaaaacacagcatgtattaacgtagtgtatattaatcaggaggaacatggttaatgcaattttagagaaagcaaaataaaggagcatcacataaaactaagttcaacagagaataaatgatgcatttgtaactgcacaaggtcacatattccctctttctcccattaactgaactgaaacagaggacagagaatagtctgagcaacaagctaactaccttccttctgacccctgtgcactttctccctaacacacactgtacaatggaacttgcatggtggtgtatacctatattctcggcccttgggaggtagaggagaagacagggaattcactcaaggacatctttggttacatgtgaatttgaggttagcctaggctgcatgagaacctgtcttaaccaaccaaccaatccacctacctatcccaaagtagaaacagaagtttcataaaactgtaattcttctgagtataatatcctttggtacttacaacttggttgcatttaaaccttacagtttctgttcatgattcaacacatagaattccaacaaccccccaaaggggttccaaccctctcaatgtgttaagacctacatttttgaaaaacacttgcaagctgtggtggtttgaataagaatgaccccataggctcatatatttgaatacttagtcatcaaggagtggaaatgtttggaaggattatgatatacagccttgttggagtaagtgtgtcaccaggggtaggctttgaggtttgtatcattttatttgattattcatttatttatatgtgtatagttgttttgcctgcatctgtctgtgcaccacatatgtgcagtgtccttggaaagaaggcactggatctcctgagattagagttacagccaaccatagttatgagccaccatggatgactggaattgaaccccatcttctagaatgcagtcagtgttcttaattgctgagccatctctccaacctccatttttatttttttggcttttttcaagacatggtttctttgtgtaacagtcttggctgtcctagaacttgctttgtagaccaggctggccttgacctcacagagatccacctgcctctgcctcctgagtgctgggattaaagacatgcaccagctaataaattcaattaaatcttcagttgattttgtacatctataatacagatcatgtacatcaattctatataacaaacatctgcaaacaggactgagacactttctgcttaggagatgacagggaaaaattatgaaatacctcaggtgtccttgggaaataaatcatcagaacttaaaactattggggctttatcggagcctaatcaatgatgaaaaaccagcttcaaccagctctagtcttccatatagacaaagagtgatatagttatgttatttagtggagagaatgcagtttgagaattgtcttactaggtaatttctgtgttgtgtgaacattactatatacctacctgaacccagacggtacagtctaccatatatacccatgctattacagcacagctctgagactataaacctagcatgtaactgtagaacatgggcagcaactatttgtatatctaaacagaaaaaaaactaggtgacaagaatttttcagcaccattaacaatagtatgaaatgttttaagttgagttttcagtgacaaaatgccattatgtgatatgacaatagtttatataagtaaccataccaccttgtgtgaggaacaacaagttatacatgtaagaagactaccagagagataagaaaaaagggctagaagaaatatttgaataaataatgtgagagaaattttaatgactgagaaattttctcaaattaatgtcagatacaaaagcacaaaatgcaagtaggataattgaccatgcttggttctaataactatatctagcacattatatttaaatttcagataatcaaagatagagagagaaaaaaagcctttggaaccaaagataaaaattacacctcatatctcctcagaaaacattaaaaaaaaaaggagcacaggaaaaaaataggtatttacagaggaaaaaacaaacaaacaaactcaaactaaagttctgtgacttacaaaattatcctggcaatgtggaagtgaaagaactttcttgaataaataagattacaaaaaaaaatgctgcatatctttcaacattttttctcttggtggtagaactttaagccacagccatacctgaatcagggaaatgctcaactactgggtacatcccaggccccacgggaaatattaagatgttctttttccccttcctttataaaaaggatattcttagctaagttatggtggtgtgcacttggaacccaagcattcaggaggcaggaggatcaccataagctagaggccacctgatatatacagtgatctttgtagtttgtataagtgttttacaattaaataagcaaaaagtaaatacgtggagaaatgacagacaggcttatgtttaatagtcttattagtacaagtctaggcctctggttcaaggtcatataaatggaggtcagaaacatctttctaatgggtggagatgctgcttagtggtaggatgcctgaaaaaaaggagagaagcaaggagaactgagatggagaaggagaccaataatgaggaaacagaaaagctgagagattgaaggggtggagaatgaggattcacaatagacaagtgactgaaaacaagcagaggaatgaaaaactgagagaggtatgacaccagaagtgaagcatttttcaggaatgtcctggttaaccaggccatgaatcacactaagtgagccaagcatataatctgattgagaaacaataaaagagttaaaaccaatccaatttgtgatcagagaccagctatgtccacataaactcatacttttaatacttctatgtttcctataggtcttccctctaaaattaggatgtttttctttttggcagtcagtatttagtcaatatttcccacaaagctaagtgtcatctgaagaaaattccaaaactcctacttagaattttcagagcagaaaaaaaaaagtatattcagacttgggtttcaaactctaagagctacacacactctctcacacacacacacactcacacacacacacacacacacacacacacacacacgccatacacatacagaagtatagtcaaaacaaatgcatatcctagactgtttaagagtctaagatccaatggacatagagacattctgaactgtcagggaaagtctcatgtttgcccactattgtctctgaatgtaataaggactcagaggtccaggagaggtatttcaacaccctgaaaggagaatttttcactttgcttccatgctcttagcaatgagtttgcttcttctgttctttctctgtgttgcaaactcagagaaggtgtattggccgggaccataaataatccttactataacacacaggtaatagcttagcaggctttaaagaggtaggaatacaactgcattgaaaacgtctacagtatttacttatcaactctcaattccagactcagcctgaaggacagatgtctatgagaaccaatggtgggaaacccattatgatcaaagcaagacctgagttgggtgtagggaggggtaccttgacactaaaaacaaaacaaaaacacaaaacaaaaacttaaaaaatatctcatcatgaccaaccagttagatgtacacattaagaagaaatgaggaggaaaaggcaccttggtgtgaaagcttagccatgcaccaaaagctagagaaataaagactgaaagccgagttagaacacagtgagacacactggctgtcttcctgttctgagcttttaggggctctgaaataatgtgttcatgaaaggattacagcaagatagttggctgcatgctgggaaaatacgagagaaaagagaagtcagaaatcagtgcagcactacaaccttggtttgtctagttaatgcttatttccttatttggagacaaaggagaaagaaattcatgccccaaacaataagaaagctgaggatctgcacagacaaaagcagaatgtgtaaaattgcgggagactaatacacaacgtttgcaaataactaaaacaccaagcaaaagggaataatctgtgtgtccctgtatctctgtgtacttgtgcatttggaggctaggtgtcattccttaggtgtcatctacattggggggtgggaggggggataggttctctcataggcccagggcttgccaaatagtgtcagctagccccagacatgtgcctgtatccaccttcccagaactgggattacaagcatgtgctaccatgcccatctttttacatgggttctgggggcttgaactgaggtcttcatgtactttactgagcaaatcagcttccgagcctctacaatatgccttagctacattgcttgtagtctacagtgcattttctacagttccacaggacagaaagaaaggccattagcattcactcccagattcctctcacatatacacagcaagggagggacagttaagtctgctttgaattaaagttatgaacatcacactttaaaaccaagaacaaactgttgggagtttatccttgttttgtctcaccgaaaccaagaagtttcagaaactagaattctgtagctctgaattatcttaatgatttaagaaattggaaacgatgacttttgcatattttgctgcaaatgaaaataaaatatatcactctaatatgtttctgggactatgtgttaaaggggtgctagttatgggtagcattttttttttgttattgcttaaggatcaactgcaatgcccgatcaggcttgatgaaggccagagaaaaagctccagagagggtgtgacttacctcacacaactgagttctaatggggaaacaacaacttgggcaggttatgttttgtcaccttgaaaagggtcatctgggaaaaaggtatttcctcagaattttctgtagacattttcttgattagtgactgctgtgggaggacacagcccattatgggtgatgccgcccctaggctggttttcagtggtactggagagcaaggtgcagagaacaagtcagtaagcagcacatcttcagcgtctctgcttcagttcctgcctccaccattctgcctcaacttccttcatgatggacaaaacactataaaatgaaataaaccctttcctccccaagatgttgttggctatggtgtttctcacagcaatagaaagcaaactaggatacagctttattattttaatctgtggcacaatatgtcaccttatgaaccaaaggaactgggccatgcttttacaacgaaatctacactgaatgacaaattactgtaacatgaaaaataaaagacccagagactgatattggggttcaagctgcaagctgaatatcagaaaaagcaaaccagccagccatatgttagttgctgccttcttctttgtgtattagacaaaaaaggagatttgtggtgaaatattgtttatgatttactaaagcttacctgaggattcagaaagcaaagtcagccacaggccatagaagccaggcatacacttttaattccagcaaccagaagctaggaggtggtggtacacacctttactaggactcaagattaaaagataaactgatccctctgagtccaaggctacccagatctaaacaggaatgaatcagtcaaaaaagagaattatagctcacacttttaatcccaacattagggaaatacagaagacagaagcaaggtctcagagaggtattcattctctagccacattgaaaaaaaaggttacagtctgaggtttggtgaagagctcctgcatggttcagccctttctgcctgagctagaggtgagagctaatggccagtactttgctttcctgatattcatcttgaagtttgaaccccaatatcagtcccttggtcttttagtaattcatgttacaaattactggtagaaattgaagatgtcgataaaaatgtcacggaactaatatacttttatagcaaccaaccaaagaacagatcagatttctattgtaacatcaggtgaaatctgtaatgaccaataacaaagaacctggctattgtgctacttagctgacaaattatttagagaattgatttccttgttattttgctaatttaaaagtgctaaattgattgccattaaatcacaacatgcagttctttgtagatacaacatatttaatgggcataaaatgtgtattgatagacactttacccttgctagtatgtaaacagaggaatgaaatcatatatatttcttccattttctgtgtagatgacatacgtaaaatttattttagtgggtagcaaactgaatataagaaacaaggatctatacagcaaaagtcttattgtctttggtccatgtgccatattctgattaaaaaaaaaaaaagttgtattttttttaagcttctccagggaaaagctattttcacccccaattttctaactgtttggatatcctggtacctacaacatagcagtgaacccataggcatgttacaatatgtctaaagtaagcaatatattaaaactatagtctccaagaattatgaaacacagattaagaaagagaaccggagaggtataatagtaaacattccaaaggcaattgccagcttacattttgataactgaaaattatctattttactgtgcttgtaggcactgtgcatttcagctaagggggccagtggctgattgacaggccctgctcgttggctgatacaaacccctgcatactgggtatgaactgtaattagaatattaagacttgtaaaaaataagctatcttaaaaagatcaagaagccagaaattcttagatacctaaaaaagaagtgtgtgttgaaagtaaattttgacataccacatctcagtttacccaactgctggggatttctcacttccttctttgttttctacctttacttaatgtcactggtctctccacctgcaagctctgataggcctattaatggcatctccattcagacacacatactgtgaactttagctcatagactgtttcctacacccttaattatcctccacagtcaactctgactcatcaatcctctactactctcaaaatccgtatctccacttgttgactttccctgcagcagagaggagatcctgatacagaaccagctctccagacaggggtgtgatgaacagctcctgaacaactccctgcttagtagagactatgttatacaacagcccaaatcacacactagcagcagagaggccatgtcaccaggacactacatgtcttcacaaaggaactgattttgaacccagctacagagtcaagtgaaggttttgcatgcccacccatcaagccaacaacgttttaaacaaaatgaaagcaaaacaaaacacggtgactcactcagtactcccagttctatcctgcaaggaagactatggtatgatcttgtaattagcctagggctctccatgatattttcattttcagaacctctgcagtgttaaaagcatcaatcaggcacacggacctgcttgcattccagacagaaaggcttgccatgcagcgtgtgttgtaggttggttttacagggttatttatgagtagttgaaacatctagataggtaagatagctgagtggtagaagtgcttggaaccaagcctgagaacctgagttccatccccagaaccttcccccataggctgtcctctgatgtccacatgtgcaccgctgtatgtatgtacacacaaaataaatacactaatgtaataagaactaaaaatgtaaattgaaaaaaaaaaaggttctgaaatagtagaaaaagtaatgacttcaacgtatctccccacttcttgccaattatttgtatcaggcactaaaatgataaatcactatctgtccaaagagcacttacctcattgtctgactccacaagaacttgatcatattcactaagcgctactagaaacatgatcgaggtgacattttcaaagcagtgtatccattttcttctctctgacctttggccccctacatcgaccattctgcaaagttaacaatattcatattaataacaaagaaaaatttaagagtatcaataatactacttacaaactagggaaaatacaatacttgaaagacaatggcagccaggtcaattaatgattattgactatctattaattgtctgttacctgacagaaataaagtgaatcactgtggttactaggaagttactagatatgtatgaaaactgtaactatgtaaaacgtcctatttgtgccaagcaaaatagtatttttattaaattacgcactgcaaaggcaaacacaggatgtttttatgttaaacaaaaataacaaataataaatttcattttcatttcctagatgtcagagtgaagaccctcatgtgttacttgaggatgccaggaatgaccatgagtacattcaaaagatacaagatgacctgtatttccaaacaaggaaggaactaattgtaaatatgatcctgcctatacttccttctgtaggataagaatttgggatcttttctttctctcagtattggcaatagtttaggacaggcccaaccatatcaggcaggatggaacctcacagggcatcatttgaaccatttcctgggtctgcttttaatgcattcactcacttggttaccctcagacaccagcacaggcaccaagaatagagtggaagtatgtgtttgtgcatgtctagcagtgcctgataccaaatcagctcctccaaattgttggagcccattttgactgatgcacacaacattcaggaaagaagtctcagaaaatgagaaggtttggtatgagaagaacagtgctctgtaagaatgtacagaacacagtgcctgctcttggtatgttgctgactcacacaataaatccaaaggaaggacttgaagaacttctgtttctttgagtgtgcatataggggtgtatgtgtgtgtgctcatgtctgcatgtttgtgtggaggaataggatgtcaatcaagaggcttcctctgctcctctccaccttgtgagagatagggactctcactgaacctggagctcatcaactggctacactagatggccaaaaagccccaggacctttctgtctttgaaccttccactctccggaccttgggtcataggtatacattaccatacttggatttttatgtagatcatggagacccacaagccatgtaccttattgaatgagccatctcccctgcccagaaatcaaggatcattcatactaccatttctaaaagactacaaaggcacaggggtgagataagagggaaaaccatgggcccatgagacccatgagctttgaatatcaaaagtggaacttttaggtgttaaaaataataaaatgctggctctgccccagcaccactgtgtaaaaatatgcaactcacttacacagaattcctattcaaggaagtcctactgcagagaaccaatgctctgcatctgaagatgacaggaaatcagaccctgaagtcattcattactttcatcgtagtagcaaaaagtatccttcaacactggtgcataaaatgtgtcaagaatgagatggaatcctaatcagtttttgaaattggaaagcaaccaagatgtgaaaatctccaagaagtactgcattctttttgaaaattttctataatgtagctaagtaagtaaattttggtatccagatgttataaactcaaaaatatgtaacacagaatgttgaccccaggaactttggtggttatatacagataaaaaaaaaaaaagaggttcacacatattttcaaggtggtatctatttcacagccatgtacttttgagcagtatactgtggcaagattaccccacagtgcaaataatagagtataataataataataataataataataataataataataataatacaaaaattggtgctttggcaagaaacagcctagcacatgtcaagctgaggaccacagcagagacatgctgcagggggagctacatgaaggcggcttcatggcctcaagcacaggcccatcctaagtgagtaggcccccttgagagccagatcaacactcaagtcaaaggcatacatacatggtcccttaaagctctaagtggtttgtacaaccaagtgatcatgaaacagtaaagtgaaaagatactagtattgtttttcttgtgttaaaaacagttccagttgaagcattaagacaaacagcagcagtgaacagggaaataatgaactcccattctttgccatattgttttctgttaagttaattactctaattttaaaagcatgaattttgaaactctcaagcactttattgtataaaacagcatgattttgttaatgctacagagaaattctgctttggtaccagaaaaatatcaatatggaagttttcaatggcaggaatgttggttcctgtctaaaatcccagcaactggaaggctgagatagggggattgctgtgactttaagctagtctgggctacagaggaagactctatctcacaaaacaaaagtttctgaaaaaatatagttgctattactcataggattatatgaccatttgtatcttacaaaattttaaaaatatattcagtgtcctcagataaaatgattttgtctgtttctcctctctcttccccccccctctctctgtgtgtgtgtgtgtgtgtacatatgtacatatagtgaagaccaatgtttgagtaactatgttctacccccagcaaataaggtttcattaattgtctggtatttggcctgaaatgaatatctttcttttgctttctctttcattgatacattatttcagttgtgcatcccaatgatgacaatccacacaaagctgcaggtgctaatgaactcaattactacctgaaaatgacactttgtaagtcaaaggggtattcgatgatccctgtggtggggactcgaactctaagcacatcttgctgtgtaggcaggtaggaagggtcggccacacgatccaagtcattcagatagctagaagagggagataggagactgtcagttaccatcattcctgacccatggaagggaaaaacaaaaccagtcacagaaaaaaaaaaaaatttcagatagtgacaatctaggaaacagacatggtcaaccttccattgctcagaggaaggctctccacccaatgtggcctactaaccatatccccatttcctcatcatagggaactcccacaaaagtaagggggagttgctaagaaattcaagttattctcctaccctctatttgtttagcaggcttggctggcaaatcaagagttacataaagtttttaattatttatacaaagattatttgcataaacaacaatgtaataaagctgaggataaagtcaggagttgtcttttcctttgtttgcagaacatcaccccccccccaggaagtttcctcagtcccctgagagaagacggacagtggcacaccatgtctttaattatgtccaaagcccaagtcatttattatttatgcaaagccatgagattttaagttataataataatgatttctgaggtcagaccttcttcttcagagccacctacactaactttaaatgtatctggtcattatacctatacatttccttggggggaaaagcaaactttttttttaaaggtaattttggactcaaaagaaatttatcaaattatcacagagaatttcttcaatgggctttccgttaatgataacaccttatgtatctatattatatttaaaaaaaaaaacaacaagaatctgatgttagcaaaattagaaaactcatggtattatttataaaactacaggccttagttatgcatattcgtagatatctatgcatatgagtttgtgcgttcgcagcatatagatatctgtgtaaccaccaccacaaccagggtgcacaactttccacttggcataaagaaagtaactgatgtattatcactgctaaccctaacccctggcaagtacaaattcataacagcatggttctgccattcccttgccactctctccaagtgtaggacgtaagttgtaatgtcatgaatgacacagtttgacagaactgatgacagccaggtggaaatgactgttctaagaagaatctttatgatgtcaaagaggaactgtacatactttcctctgccctggaattgctgaagcacaaaaatggtttcaaaccacatagttacaaagtgtctacacaaaggggccatacgtaagaggtagaacaatggtggcggagttaacagagctggaagacataagacacagtgagtttaaatgttggtattcatggggttacaactcagtcattataacacactcagtggacagactctacctgagagaagactgttctatatccacacatctttatttctacctcagtatcaagaaaatactatttagtcattcttggatggatggatgggtttccaatacagagatttagtttgagcgttaatgctgttagtgtttaactattactattggagtctctttatgagtgacactgaaggtaagaaggaaatggtgttctcaggttgtaagatgtacaggctcataacagaagactctgactttaatatagaagtaaaccgactgccttgttggaagtgaaccagtcctttaaggcaacagcaggctagaattcctacagcaaagcagctattcatacacaggccttattccagacacatcaacacatttgtagctagcaatgagctctctgctgactagcaagaactccttcataccttcaattactataaacctggctagaggacaaaaggggactgctgggagaatacaagtataaagctgtattttagtgaatctgcatagccctggtcactggatggaatgacaaagcccatgttctatggattgactgtttctcctctactgataaactggctcataccagatacaaaacaggctactctctacaaatgcaactttgtaacttatcagagccttgatttaaaattaagcatatattctaaaatctctgtgatcatgatttatatacaagaactcagaaatcttagagaaatcaaagaactctgcatttacagtggcaagatgaaaatgaaactaagaaatatgctaccataacagtaatgtcactcacaagtcagaagagaaggctgctaattcccatgtacatggtgctgaggtagtctagaagtaaagggaaattatggttttgcttcctaaagatgaaccttacctgagtacccaatgctgcttgcactgtttctaagcacaaggctatatttgccagggataatttaaagaatcagtgcatgaagtggggatttttctgtcagactgcaccgtaggaacatggacagcatctctccagtcatgaagggggcaccgaactccttacaactgtatggcatggaaccagggtacatcctgcaactggaaagccagctgcataggctcagcagccaccctacagaactatcagtggcactcttgtgtgacatagggtaggtactactgagctgtctctagacattcacactacgaggattctcccctctttatccttcctacagctcttgtagagtaactactacttacactgagtatttgctgcttgccaggtctaagtattgtcaacaccatgtcaagaaatagttttttaaaacgttccattcaaagctgggcagtggtggctcatgcctttaatcccagaacttgagaagtagaggcaggcagatctctgaagttggaagccagcctgagctacagagtgagttctaggataggctccaaaaaaaaaaaaatcaaaacaacaacaacaacaaaaacatgccgttcagactaaagacctgactcggtggttaagagcactgggttcaattctcagcacccacataatagctcacaaccagttctacttcagttccagggaaccaattccctcttcttgcctctgtcagcattaggcatacacatggtgcacagacatacacgcagacaaaacactcatacacacaaagttaagtagatttaaaaaaaatctcatacatttctgattaagttaaaagtgatggtcttgcttttgcttttcctcagagaacagtgcagggaatggctcacctcactcggggcagaaaactaatgtagtttagcaaaaggaaaaggtttgaacactatccatctctgctggtttcgtatacaccacctacccccaaagcaaaccataccagacacacccccaagcaaaagcagtgaaaaccaaaacaaactcaccaaatgtacaatctgtatatataattattttctactaagtggctcagagggtataatactgaagacacaatttgcaaagcagaaaacaatagacaagtgagaactgcatctctcactgcccagaaagggccaacgtgaacagcttgtgcctgcagagccccaactcatctgccttgacaagcagggctcagaggaagaactcacactttttacgtttcatgttggcttcatattactttgtacccctaagagcggtactctagtgtagtatgtcctcttcatttatgcctgtcacattttgagaggatgtaataaagtaatctctattttttatattttccattgaaacatttcagattctcagcaaaaactaatggaaaatggggggtggggtgggttcatgttgttttattccactcatttaacctttaaaaaagaaacactagggcctgaacaaatttatattgcagagtaaattcggagagttaattatagctataatttgttttgtaagactggttttgagtggctgctgaggtcattctcgaagtgttgctatggtgatggcacaggtacattgccaaggcaatgcaagtgtaaaaggtagctggtagaaactccttcctgatatgaggcacaggaagaagtcattgtatacatggaccttaattatctaggagataagtcacttctaagaatgtttaagaaaaagcaagtttggctgtttaaacactccttattcccatcctttataggccttcaatgacttctgctacactgagacattggagagtttgatactgtagattaaaaatattcagtctctttcacatgttttcaaattcagtagtcagggttcataactatatttatctgtggctgtattaccaacacttggctgggagtctgggccacacataacagatgctcagtgtgccacccaaattaaaactattttatcggaaatgctgcagtggctaggcaagttacactcctgaggaacaagcataggagccagggggtggttagctacccatctttatgcaattatatttctgggatatagctggcctgcattatgtaaaaactaaattctgaattaaaatgcctctgacaaatttaaatacaacagaacaaggaaaggcaccactggtttaacttcatttaggagacaagcttcctgctcttaagtcctggccacagaatgacataattggtatgagcacactcgtcagtgtgcagcttctggactttggaattccatctaatccagtggaaattgacaaggttgaatctatcaacaggtatttctgatataagctctttaatggaacacaattttgttggttttcagtaaaaagtgaggcaacaaagaaagagacaagttcagaaacccgacagcagttcctttaccacagcaaaacacaaagtcacctggagattagcatcacactggacttgtagcattggtagaagctaaggatatgaaaatgcttggataagattcatgggctatgaaggagtttgccagcacccaggaagaaccccagggtttatttggattcagtcagcatctgggaatgcagtacaagatttcaagtgataatccacaagcatcttcctgtccagtgtttgaatacatgaaagaatgaaggcaaccacactcattaatttgtttagtggccactgtattcttttcataattaacttcaagatcattcccagctacaaaaaaatatgaaatttggaaaaaaggtgatatatcattgctttgaattattaaaagtaaagagtcaagctgaaacttcactaaaataatatgaccaaatcaaattaaatttgatgttttttttttctgtttgggatatgattctaactgatcactaatattaacaatagtctatcaataacagatttgagctaaagatcttttcaaaattagagaatttcactattgtgactagaagggtatcttcaaacaagaaaaactcaagtgccccccctgtaaatgaaagcaactgagaataatatttggcaattatgaacaaaatatatcaggatagttgacattattttttttaaataaaagttagagtcatataaactctagcaattacagcataaagaaaaaaaatgacctgtgggtagtaagtatgaaaagaagtttatgttgtgtggtgcaaacccagctaaatacaacaagataaaacagcctcttggggcattaacagcatgctcttgggtgcatgtttggaactgtgggatttttaattcctattaagtgtcttcactattaaggctgctatgtaacagatttgcagttcaagttcgatatgaagttggaactgtggcacagaaaaaatgatcctgggtaggtttcatatttttaattattaaaaagaaggttacaaaaactaggtcgccttcattaaaaaaattaacaagacctcattgtgagaggatcagtgtcttgggagtagaaagctagatcatgccaagagaccctacctgactgacactgtcagagcagcgaagatgaggaaaagccatagctctgtgcagagctgcatgaacacaaaattccagaaggaaagattttaaaacaaaaaccaagcaatcaatcaaaaaaccaaaaacaaaacactgctagagtgacttttacaaaattaatcagtgatggttctgtaaaactactacactgaggcaagcaaggttcagagggaggtttgggggacaggccccaaacgagcccctccctcttctggtctgaatttggccaggaatctggctcagcttgttagctgcatgggattactcattacacaaacgtgtccatctcagaagagcaccgggaagaaggaaaattaacattcctcatgattagtgttcagtgacagctagcatttattacaggtagatttgttcatgaagttgttcgcttttcataggaaatcccaaaagagcaaagacccagagtggtggctgcagggttatgacccaggttcttgagaactgaactcatcaagggaaagtaatctctgccaggaagagaaaccaaagggataaggtgctctctctctctctgaccaaagaactaagacaattcatgaagtattctttctcttagcaaataccctgagtatcctgaaaagaactcagtattgcacatagaaaagagatttggcatcttaattttataatcagatggctgttcaaaatggttatcaaaaagagactcccaacgaacagtcaacagattgagcaactctgtgtgctaagctgactccagtgtcacagccagtgctaggccaccagcaatagattcacaactgtattgcacaaacaaacagatcaagcttgtaactagacataaacacaagtaggtgcaatactgcatgcctacagccctcactactcaggaggctgagcaggattgcttgtgcaagagagcttgaggcacctgtgcaacacaaagagactgtctcttaaataggaaacaacaaaaatctaaagaaatagagacagagaaaggcaaaaaagaattccttatcaaatttgcctattggagttttctaatttactttcctataagacagctttcaaaggtgttgattaattctgacacaattctgaaacatatcaagaattagtagaaggctgcttcttaatctgtcttgctgtgcaatgacagtgcttaattcagctaacaaatacctggttaatgagaatctattatgctaaagtctaaatcagtatgcgtttgatggaaggaggccggcacaaggaaatggtatgaaaatacgttaaaatatatttctttcccttagggatgtcagactatctgggaagcaaagatagtacagatgaatcaattaagaaacaattaagtaccaaattgtaagctgctaactaagaatgcaataaggaaggatagatgattatgaacttcagtcactagagaataatgtgcaaaaaaaaaaaaaagtgggggatgctataggcagaaaagagaagaaaaaaggaaagaaatcagaaatggcacagaattttcttagcctttcaattggtaccttctaatgaaagttcacagcaaactagacagtaacttcaacagtgggaatgaaccaaaaggtagaagagccaaatcccctcctgaagaaagtggtattctaggaatgaacacagttgtgttgcaaataaccactggcattgtggacatatggacctatgagaagttccactgatcacagttatctataaacagaagcaagtttcctaaggtattttaacttaggggtttgtcctgtaacaccagacactgatattccaataccatgatcatgtctggagactgatgggtcaacctaatttgacttaacataccataagacaatattcaacctattattcacttaatgtgtagaactgctttgcctgtacatatacatgggcaccacatatctgtagaggccagaagggggtaatggatccccaggaactggtgttacatactgttgtgagtcactgtatggggaactgaacctgggttctcggtagagagctgttagccattgaggaagttcaccagccttccaacttactgttttacatggaaaggatacagtgatgattactaagagtgtcagggtcagccagtcaggctcaaaggttgcttgataggcagtgagccaaaaaggaaggaggctcaaagactttgagggtcccttaaagacagcaggatatgctttatctggtcccttacaaaaccccatctgtcctactgaatattaacccaatttcagtcttcttagcgaccttgagtcaagcatcagacccaaagatgggtcagaaaacagttcttctcagaggccaaagaaactactgaacatttctggccatttacatcatctttagtactagatgctctgtgtggctggtacaggcattgccaggggtgggggtggggtgatcaatccagagctctgtgactcactcctatcaggcctcagggtgccatgcaatgtttctggtggaaactgaagaacaaaagcgaacatttttctcaactctctagaacttattttggagttaatttagaacaccagtcttcagcaggattccatctgaatggtagaagcattgtgctagcggtctatcaacattcagtgttctaaaggaggaattctaaactatgtgcggatgtgtgagcatttcaggctttatgatccatatggtaactattttaatgatctgatcctgccactgggtgccaaagaagctacagacattcatagatgaatatgtacagctaagctccaatcaaacttcataaaaatagaaagtaggctgaattttcctaaagtctgctcatccccattgtacagtgacaacactaagattttagctaaggacaccatctttctgagtaaagtctgtggaggagacaatgaggagatgcaactatttaagaattagctaacccaaaggctagagactggctaagtatatctgagttttatttcacccctatgagcttcatgtgttctaaaactgaaaaagactctgaaaatcagacaacacagaggttctatttgttggtcatatttctttcactcctgggaaagatagaaagatgtacaagtaagtatgtcattcaagtagaaaaaaatgatacctatgttagcagtaaggacacataggcattcattcagaggccagaagtcaactggttgttttgatggtttggtcaccttggtgcacactagattcacttgggggagagaatctgtatttaagaatcgtctagatcaggatggcctgtgggaatgtctgtggaggagtctagactgcttgattgacatggttgataagatccagcctaaaagggagaggtgtcattccctggatctggaccctggactacataaaagtagagaaatctagctgagcagcaggcttgcatctatttattctctctctgctcttgactgtggacatgttatgaccagcagcttcaagctcctgccactgtaactcccctgctctgatggactttaacctagaattgcaaatggaatcatttccaccctcagttgcatttgtatagtgatttggtcatagcaacagaagaaactaagataggcatgttcacaagataccattcaccttgttaacttattttcaattggcgtttttacattttacttattcattcattcattgatgcatatgcgtgtttgtgcacatggagttcatgtggagatcagaggacaaattgcaggattcagttctttccttcaaccatgttgaacccccaaatggatcaaaggtcttggtgacaagtaccttcatcagttgagccatcttgtcagccccatcttgtttttgacaccgggtctctccttggtctggagctcctgattaggctgggctgcctgattagtgagccatggagacccacctgtctccagccaaccagcatggagattgccagggaaacccaccatgcctgggcgctttttacatggttctgaggttcaaacacaggttctcaaacttgtgatgtaagtactttattgatggagctatctcccaggccttgttatcattactctttaagaaagaacaaatatattcacaatcaatatttcattctgaactaagatagcagatttaagaatttactcttgctgggcgttagtggtgcaggcctttaatcccagcactcagtaggcagaggcaggtggatctctgtgagtttgagaccagcctggtctacaaggctggtctagttctaggacaggttccaaagccacggagaaaccctgtctaaaaaaaaaaaaaaaaaaaaaaaaaaaaaagaatttactctcacacaaatttatccattgtctacagctgcatctgcacctagcagtgagacaatgaccatatggttcacaaagcctgaaatgaaaaaacacacacagtaaatcacacatgttaatttgacggtactaaattttgtttgacttcgtaggctatttctcagtaaaggcagtctagtgtaatggaatcaaaaatactcaaaatttagaagttgactgaagcattaaataccacgcactatacctggggagagtgaggctttactcattacttcaagtttcagaagtgatgagcaacagagggaactacatggactattgcccaagagtcttatcataccttgctgtttccttccttcaggagtgggggaggggggtgggatggccagaagagccacaccataccccagaggtatggagtgttcaaattattactcagtaacttcttagccagggatcccttcttaagaatttatctctaaatcagatggacaggatgtcctaattctgaaattccttttgcattttaaaatcaatgtaataatataagatatgtcaattcagggtcataatcaaagtgaattcttgtgttgatgtgtgctaaagggccaacttcttcatgtacttactgctctagactaaatggaaactttaaaagttgtctgacttccctggaggggactttagtaaagtaagattaaggcaaacccagatatagtagtcttcagcctaagactgcagcatgaggacttttttcactatacttcaatgtgactgagatttgtgttctgtggctagtgtcaggaaatttctggtactgtaggcagtgaactcatttgacctgatatctcagtctattaaagcaggtggtgaaccccagaaaaaaagaaaacataaagccatctgcttattgtgttctttttctaaagatactcagagccttcagggtttttgtttttttaatcaataatgaaaaagttagtaaaataatctacaaaattcttcagaatcttaagagtgcttttaactggctcattctatagaattgaagaatgcaccaaattaaggccacttgcaaatttatccaaagtgtttatccatttcctgaaatttctcatctcttcatttctcccatggctatttgtccattgaggcataactgattatataacaagtaggtataaatcagctttataatgtccttaatcagctcctgtaaaaagtgattgggtggaatagaagatgaagtgtgggggagggtaagagagtggactaagccaggcatggtggtgcagaactttaatcccagcactcaggaggcagatatctgagcttgaggctggcctggtctacaaaatgagttctgggacaaccagggctacacagagaaactctatctcaacaaacaaaaaaaataaaacaaattaacaacaacaaataatttcccaaaactgtacactaacatttatacaaatatgtatgaattatctgtacttagacttagtctgtgttagcaggaacagatatgctcaattggtgaaatacaactaagttttaatgataatgacctaaatcctatgggtttgttttctagtaaggatgccccatttattcccttttaaccttataatgtgaagcaacttggagacatcaccaataaatatctataatatgtatcacaccaagtgatttataaaacacccaatcaaagatatttatctagtagggtatgaagtatgcacatgtctaacaactgtcaaatacctatctgtcttctaaccatctttccatctacccactgtgaagccacatttcatagtggctaactgcttaggctctggaacaagcaaatctgattcaactcccatttatttcagtttgaccctgagcaggattcttggtcttccagagacctcagtttttcctttataaggagacgataagaaatacctctgattccactgtttgaggctttaggtgttgtaaggaatgatacatgaaatgactaagcacagaatgtgaaggactaagtgtctactaaacagtacctattgttgttttgaccagaacctttgagatctcggacctttaaaaacaataaggaaaaaaggcttatatgtcttcagcccttaaatttccaagtccagcagtaactgccaaagacaaatagagtgttgcattaaagtcgttgaaaataaacattacccttctgtactttcatggagcaatagttgtaatggcctaatagaagcactcactgtaaggtactgaaaatagaggggagtattctgagaaacacagaaatatgtacaaagtgctaagacaggtgactgggtcaggcattcagaaaagggtgactcttaattaagtcttcaagggtgaacgtgagttcatcagataggaaaaaagaagagtcatgcttggcctctgcttccaggattcttggcacgaggcttgcatggagtctcataaccagcagtattcttgggggtgggaatggggtggggggagtggttaagtcttagcagcaaagcaaatgtttctgacagatcttgattctcacacagttagaaatctgagattgacaaacttttaacagaagtactgccaatacaaagacaaaagggaagacccatttgaaggaaaagaaggcgagattcagcaaaaacatataccaaagaaaagggaaatgtggttatctctgttgggaggactacctggcttaaaaaaaaaaaaaaaatggtaaagtgtcctgaacacacaggtcacccagctgctctcaaactgtctagcaataatcttacaatacctagaagaaagtcacttggttgtgctctccttaaaaagagacttccacagaaataggaaagcaactaacctccttaggtttcatttaacttctggcaaccacatgcctacctacccttaagacaacagtctaaatttgcttgttcagtacagcagctactcattccttctcaaggtatcctggtttggatgataaatgacatagttaccatcttattgagtacacgaggcaaattactggttttacataaaagatgaggacacacagctttacagtaggaaatatatttcatggtaaccaaaagcaccagctgagtagaaaatctacctcagaaaagaaggccaacacagagcaagtaacaaacgcagtaagtaggctgggcatggtagcagatgactttaataccaagaggcagagacaggaagagctctatgagctagaggccagcctgatctacataggaagttccaggccagccagagcctgcctcgacaataacaataaactattactactaccactatgaccatttaacagatcctactgggattatttataagcaattgtacaaagaatcaatcaggaaaccaaggacactctttcagaatgcctgtgagatgtaaaacaggtagggtagaagagccttaggagacgcagctaccagatagatgcaatgtgtattgctaaaattagctacacctaaatgacattttagcagaacccgaggaatctgaacataaacttaggtataatttatgtgccgttattaactatatagcaaaatgtctttttcttacaaagatacacaaatgaaatgtctaagggtatacaagatgttataatttctgtatataatttctgtataatttctgtattatttcagcaaaaaacccatctaatatatgtatgtatatgcactcacatacatgcaatttaggaaatcaacttatcccaaccccagtacagcaacgtaggaacacataaaggtcaatcagttgggggacttaaatcagcttgtgccgggggccccacatcaatatcagctttgtccaaccagcaggtatatttctgtgctggactcggtttatgctggcagaattgtaaggtggtggcttactgaggtggaaaaatgctcaggacaacactcagtttacaataaacattacagtaatatgcaaaattcaccattaagtaatgggtacacatctcaaaatccacaaatctcactgggagaatgtcatgagagatggcagaggctgtctcaagagaatttctatgttaagtcaacagttccatgcaaaagaaaaatttcggtggtcaaccccccttccccactgcaggggacaaactaggttctttatggacagccatgaccctggtggatacctaagtatcagatattggagttttgacttcctgatagcaaggcctctctataggcagaatcataattatagataatgagtaaagaataaaagagatagaaaagggaagagataatacataaaataagcataaacagaggttggcttgggcttcgtggtagagtgcttgctgcatatgcagaaggttctaggttcagtctcagtactagaaaagggagagaggagggaagggaggaatcatggagcatcacttagagacaggatcttgttagcaaaatgaaaggcagagggagttcagggagactcgagaatcacaatgagggtggaggggtaaacaacaggaggatgaaacatgacgagcaggaacaggggagggtggattaacacagcagcaacagggagatggatggaatctgaaatggcaaaggaaacagaaggacagaggaggcaggaagtaaaagacagacagctggtcaaaggtagaggaggcagcattgggaatagacaagagacaaatgcaggtttcctatctatgtactctactcacagaaacttacacagaggaaatgaagaggagggaaaggaggtgggcagggcaggtggaagggtccagagcctgaatggtgatgtggaaggagggtcaggaggaaaggacagacagtgacagcatacgccagatgactgcgcacactggagtgcttgtgaaacaggatagacggaatgctgctgtcagtctagaatgacatgattcaaactaccagatgatacaaaagtaattcattcatgcaacatttctatgatttgaaccataatttatcttatgcaaatgcctggaaaggcagaaatgcaacttcactgtaaaaagaatgcataacccctgggcctccgagcagtcctgtgggacatcaatcagccactcagggcccctcattttgttctgatgcttactcttaggcactgtcactctataatagggactggctcaaggctgtgggatatttcccatcctgtcttgtgtctaaccagaaccaaagtaagaaggggaatggaagatttacctaattaatgtagacagaaattgcctagagaactaaaaaaaatcaacaacaacaacaaccaactttatttcccagatcggtagctacaatgattttatattaatctcatgctgaacttcatttctgttgtgtacatctgaagatatagaattaacagatctgttttggatgcaaatctttcccaggacacatgaaactaactgacagctcacacaataaatcaggtatgcatgcaaaattaaaactcacagttttcttgcaaaagaaaactcatctgtcaataatggttccttgaaagcagataagggtctgagaattagaagttagggagtcttatgttttgggaagtcataaccaaacacatttttttgcaatttctaatccatgcccaaggctaagatcagaatttttataaaaaaaaatgttgcaaggtttcaagtcgcaaatgtgtcttcatttgttttctactgctgtaataaagaccatggccaaatgcaacttgggagggaaagggtttaattcatcttacacatccaggtaactaaacatccctcactaaacggtagaaattcaagcagggcagggaattgggggcaggaagtgaagcaaggccatggaggaacacttcttaatggcttgctctccaaggcttgcttaccctgctttcttatagcacccaggaccaccatccaggggaccggccctcccacatcagtcatcaattaagaaaatgcctcacagacttacctacaggccaaattaatggaggcattttctcagttgaagtttccatgcttgtgccaagttggaaaaaaaaaatctaataaagacacaatggtgcatagatttgtggatcactggcttgcagtttgaggaagaaaatggggtgatgaaaatcagatcacttttgttttcaagtaaaacacagtaaaagaaatttgggcatagctaaggtggtagaatatttgcctaccatgcatgaagtcctaggtctgagccttaaaatacataattggcacagtgctacattcctgtaatcacagtactccaaagttgaagataggagtactgggaattcaaagccaaccctggctacatgagacttgtctccaaaaaccagaaaatattctccaccttatgacctcagtaccttatgactgaatctacacttacgaattacacacacacacacacacacacacacaccacctaggcttgattaatatatgcacagcacagactacattgttacaaatatcacagagcagcaagcagtttctcagggcctgcagtgcagatactcactatttggtagagtcggataactgatactctcgtcgtctgtcatagcactcctgaattccagggtcattccacaagctctttattgcatctacatatggattctcaaaagcagacaccttctccacatcaacctctcggactaattgtgcatgagcctgtttagaggggggaaaggcaactgtttgaatactctgaacattgctttaccaagtctttgattcacactttatattatacacaatccaagtgatatcttaataaactggttttaaaaatggttcataataacatgtcttcatttttgttggtttttcttagtgagaacctagcccaaaatcatcctctctagaggatgaagctaaagctattagaaggaacaggtgcaaagctctttcaccatgacagcagggatgccctgctgtagaggcagaccagtgtgctaactggctatcacaactctttactataccctctaccccgacaacttgttatactcacacactcgccctcaaccccttaggatctccatcaacagaagctcggagtcctcaactacaagttgtccttgatagttcactttcagatgggccacacccaccaccaagagaacagtttaatgatttaactccggtaattcttcttcttctagtctgacatacctcatgttccaaaatatttgtatctgccatctctttattatcaagttgaggaaaccattgcatattttagcaatcaaatagagctttgctattttcattatagtacacttagcaagaaaaacccaaagatatttaaattgttgacaatattaaaataacaatgttttacattttatcaataaaatttcatttatcttcaaagtagtcagaaaacactattatttaataacactaatcaaattaggcttcaccaaatatgactatatgcaaattagatatacataacaaatatacaaacacactaatatagctaatttggtaattggaggcagatggctgatagctattgaaacaattctgattttgtattaaaaaaaatctaaacaaagttagtgaatggctgtcatgattatatcatggccaattattcctttcaaatagtatgaagaataaacaatgttagtaaatgcaatccatgttgtggcctgtctggatcttagtcttcaagcaggaagggcctgttttcaataacaataacaactaattttgacttaaggttttaggaagttcaatgtatttgataccaaaatcccctttgttattagttatgctctgatcaagaaaattgatctagtcactgaaaagtcttgctccagtctttctttcaactatggaaacaaatcccggaagtttcactgtctgtatcagtcccagtttaggcaatctgccttgttaactaccagcacccttgccagactgggttcctgcacctgagtcctaccacaggtggagcctatctcatcatagttctttctgaggtccatcttcatatctagaaggcctttcttattcatttctaaaccttttaaaaagaggttctgctcaggggctgtgccatatgtcaccacttacgaggatggccattatgattttcctctccaaaaacacatgtgatttttgtgtagtttgatccatggaccttcaacattttgctatttgctggttattgtatcttcacttatcccacttgtagattacacagtgatgaaaggagctatgaccataaagttcacatttctctggggctcaacacagaatgaatgcacagtaaatatttaaatgcatttaaaagtatacataaatgtaatgtgagtacctacaagccatagtttcaaggcaatcttccatctttacccactttctcagaattagagtgtagcacagttagtggaggagcgttagtatcttttccccataacataaaagttcaaagacaggcttagctttgtagtatcacagtttgctagagtgctgctgatacttagtagaagctcaataaacacttgcccattggatgaacacaaggatgaaagaagaatggaaataaacagtgctacaaatcaaaagagctaacttctggctttagccacacaaccacttctacctgcagcagaaactacttttgcgtatttaaaattaattttccttgtccataaggtgagacaattggatcaagtcaacaaagatctcctctatagatgaacagaacgactgtaaatataccataatacataaacaaaaagggattatgatactgtccctttttaaaagaaatattacatttattttatattatgtgtatgggtgttttaaccacatgtatgtcaactgcataacatgcatgcctgttgctcacagaggctagaagagggtgttgcatcccctgacactgcagttacaggcagctgggagccactgtgtgggtcctctgcaagagcagcaagtgctttcatttattgagcaatctccccaaccccagcactgtccctcattgaatacagctttcaggaaaacaaggatttactattttaatcaacaatctaatgaagtctgtacatgagcaaagaaatgcaacatgaactgagaggccaatgaggcaaagagaagagagtctattactcgatggagaagatgaagcatgtagtatctgaggaggaatgtgagcaaaaggtcaatggagaaaaatatatctccttctttcaagtgcaaaaacagattcactcaaacaaccctctatctggaaagccctgagatttgtcaccactgtgaatccacaactcagaagtcactgcaatatctacaaaagaacatcacctccaaacacacactaatcatcatgcagccttcatgcagaatacaatttataagacacatttattacctcccaagctcagaattctatccttgctgctttggaaaaatgattcaaatataatcaagtataaattgcatttatgtagaagtttgaactgaagttctctaagttgtttaaaagtataatggcattttacaaaatatgcacaaaattaaaaattgttaatataaatgtcccattgtcaattcaatcattatttttgaaaaaatattcttgacatagaagtatatttagtatgttagagtaggaagataaattagaaactgtattctatttgcccaatgtcaaatgtgaaaaagtagtaagaaaaaaatctaagtaatgatgctaaattaagcaattattaattttaaaaggctattatgggcaggaaagaagtcgcttctaaataatataacaatgttagagttcacttttctattttgaacaaaatcaaagtgagtaaattcattaatcatgtaaacaaaatgtaaaatccagtctcgtcatttgaagatagaatcgagcacattgaatggaaataaacgtttaagcatgtattcaggctttcagattcttagcaagcaagtttgagaagcacactatgagaagcagttagctactttcagaacctctggcagaattctagagaagaccacagagaaaccacaagatgtaccaatgtaattaaggtaaatcttacgtgttgacatttctctggttgtgtctgcagagggaaagtggagctgaagactgaccacagtaggtctcactctgcccactgaaggcaagtgttcagattaaataaaaaagtctcacagttaatgctggaatgatttgttgatcgctcaagagagcttcagtctattctattttctatactccagaagtagaaatcaagaggtaacttttgcacttgctaagagcttttaaaaacaaatattgagctttgtatgaagggacccccactatgaacaggtactctgaaacacaaatagcaggaacctcaatcaatcagtcctcaattctcaactgaggcccccactgtccttcattccatccccctgttccttatgtcctttggcatttgagtcctaaacaacacagaacaaaactgcagacaaaaagtatccgagtgacttcttggttggtttggtttttctgcacaaggaaacagagtaccacgacagcttatgctacaaacccacctccatttggtgccagctgaggatgaacctgctcaaactgctaaacaccttctaaacctgtttccagaaccccctccctgcccccatgatgttagcctggaatactgacagcacctgctcctctaacggttaaactacagaatcattggggcccaagagtgggtgtgggtggtagtgaagaggcttacacataaagctactactgaattcaaaggccaaaggaaaggaaatgtaagaccaacactactacgaaccaaggcgcatgcaaggcacatgagaccctgtggtgtcagacaagacattcaagcctcatttgactcaaatgcaaaccattctggaacgctcacttatacagatctctgaaggctcaacatctgcaaattccctaaagacaatggaacataactctatcagtctttgccttctgactccacagctgtacagctgaccctcttgggtgtgctgcacacacaactgccactgcatctttttgtgagtattaccaggccaatgacaaagaaggcaaagtcacactgagccactgctggctagggtcatgccatgaatgactcatccacacagaaccatctctccatgcttttgattcctattggctcagttgaatactatgacaaggcccttgaagtccccaatgaagattacagaacccctgtgtcaaatcctgcagcaaccatgtccttcttaaccttggtattagatggagactatggagtctctctgaaaacagttcagggatcaagagtagaagaagaaagaacatgagtaacaacctgagatcaaatacaccctgtgctgtatttgtaggttactcaaccttcttcaagtctagtgttgtcatctacaatgggaacaatttgctattggactctcaaaaaaagaggtgttagtaggatgcctgctacaagtgttagaatggttatgagatcttaaatgacttaaaaactatcatcaacaattactgctttcaataaatatttgtctctcacatatcagtcaatgccctaaggactggtacagagtggagaatttatgttatataaaatgttctgacaagaaaatatcagaagttaattaagcaaccacatagtactctatttgcaacatattgacaaaattgttagatgtcctcctctaacattcgattttcatttttaatattcattttggtacttgtcaaagcaatcaatgactatcaggcatgctgcctttcagggacaaccctcttcctattgactttgctgctctgtagcctgtacttgtttatctaacatacagttgactgcttcataagtggaagaaagactacttgtaccacttcaaatattcttttacttttcccaccctaccagcctcattttccatgcactcctgctcagttctttgcttatcctttcctgttttgtgtttggctgtatcattatcaaatcagtagctaagacacagaaggtcagatgctagctacagcattgaataatgaacacatgggcggcttccaagagcacactgtctgatgcaattgcaagattgcaggagagaaaaatctcgaccctatacctttctggtcatgtggtaatgtcatactatggtacatgccttgtgggcactacattcagagtttatacaaagcctcggcaataaaaaaaatagaaagggaaactcttaaagatatgtacaaccattaagatccaaaaataattaggctatgactatatagttgctttcaaagaatatctgaggaacactaattacttgaatcttaacaactatctgacaagtatgttctaaaatgaaaagagtgctacttatggtcagaagaagctgagcacagataatgtgtggcacaaaatttcacaactctactgaagtaacgcttttgcaaattcgaggctaaggcttggagatactgcaggcttcccaactttgtctgacgagaaaaattcttttcagtttgtttctaaactggttagtggatcacactttgaaaacaaacagggactaatgacaaacccccaacaacaatgtgggaagccttttatacaaatgagcaaccctctgctttggcacagaggtcaatgctgcttcaggagcagcgcctttgtcatttccaagatcacacatgacattcggttcacttcctaatattaggttcaggggaaaaaaaaaaaaaaaagaaactaatcaccttagtcattgtattgtctgtgctcctaaaatcttattagccagtcaagttcattgttattggactgggatgttattttgcttgacaacagaaagaaataacagataaacaaagagtgttttactgaataaaaccttccctattaaaacaaaatacaaaacagaaacaaacaataaaaccctactgaacccccacctcatcccaagcattccagggccctgcagagaggctagaatatttcttcaaccattccatgtgaaatatggccactgtgtggtttcagttaaactgttgggagaactgaaagtgaaaaactcactctctcagatctaggcaaagaaaattttacatcttaaaacacactgctcctactactcattggccagaagaacaagaaactgtttcattagtgaacacatgaagagaaacaaagtgaccacacatccctgccctacacagaagagcaatgaatctgagcagcaaacaggaaggaaattcccactttacaaactaagcatttttttttgcgtattttttttaagtcaatgcattatacaacttttcactcttaaaaatccaaatttcaaaaagtttagttaagagtcaactgttagaagttactatgtgctcctacagagactacgatagcttacagtttatactgtggcacttgcatgttacactatatgaaagatttatttattgatggatcccgaaaataacttttattaagatggtatcattttaaaaaatgtacacctgaagaaacatttcaaatcaagtaatttctgaaaaattacaagttttttttttttatctgtaatggttaatcttcatagtcagtttgactgaattaataaatgtcacttcttaagataccaaacgaaagcggagaggatggggcagcaaggctgtgttaagatccactaaggaaagaacatttatttaaccttggtaaacaacacagcatcctgaactgctcaaaacatcaaatgattactatctcaccagaggttttctggcaaagaacaggatacactactgtatcattcctaagagttaaaccaaataaatcttatctatcagttggacaggaaaatgcctcccaggaaagctgtctgcaccagagactaggaaaaaaaaatgtataaagtctgcctggacacggggaatagcacagtggtctctctggccactgtccactctcaaggtgtgagagtggtttcctctgcagtggcacctttggtcactgcccagttccacctttaggagcatctcacatcattctgaaagaaactctgtcctatacactaggttctatatctcatcaaaattatttggagaacacacagattggggatcggacagtaagccagggccaaatcctcaaatttctttgactacttgatcacatagttcttagtcttgttggatttgtttgtaggaaaatgtgcaagaatttggagttaagtatactagagaagccctagaatattccaaacagggtttaatgggtcattctgatgggagggtggaagacctgaatgctgatagaaatgcagacattaaagcccagttaggaggtttcagagggcaacaaggtctacaaggtgactggcatttaggaagatttacaatgagggggaaacgtggtttggggaagaggagtgtgaatgtggttagctaatgttggggttaaggtttcaaaaagtgactgtatttgttaaacttgaacttggcactggggcattagaaaggttctctgaggataagacacccctttatccagggtcccacaatgcaaattcatttggaaaggagaatgcctcagaagacagagcctgctggaaaaactaggaaagtgttttcccagtctcagccccaaaggcacacagaatacagtggagttgtggtccaagggtccagactatagccagcattggaatttggcagttatcgaattggctcttgttttgcaggcatgcaagttgcaggagtgagagagttatgaatgcttgtgccaaggttccaaaaaactgctgaagcaaggcagtgtgaagaagaactggactcctagtaaggagactccaaaaggcccccacatgaagctatggctataaaggctcagtggagaccctacaatattaggtatcacaggaccgtggaacgtctactaggaaaacctgcaagcaagttaatggacgcttcattaaaaattaaaacctaggacagatgctaaattcatggaacatcagacaacaggtagaaactttaagtatctgtacagcagcaaactgggacttatcaacgtatatatgaggacttgggctggggggacaggaaatctagaagggagaccaaccctgcacagatacttgggctacgatttttaaatcatcatcatctaaaattcagagattttatatgaacatcccccaaaccacaaaacaacaacgacaaaaccagattctaagacccagcaacacttcacattacaagaggataaggggctgtttgtatattatgctaagtcaagaataatgggagaagacataattgtttgtagaggtgaaatatatctcatgcataataataataatagtaaaaataacaactatgctgtacacaagctgaccagtttcaggttacttgcttaaccaacatccaagtggtcaacttccctgcagggctggtatagtttttgtcttctttgtgtgataaggaagctggtgcactctccagaatcttgggtctgactcctgtcaggaggttattttctgctattttggtatgtgtgcctgttgttatggtcaattctcatttgaagttacataagataattacagtgccactggtgattactttagctagcttacgtttttaactgaagcttcttgacttatagtgacaataagggggtggggggcttttattttctctatggaaaagcccaaagctcagtggtatctaacattcatgttttgaaaagcacacaaagcctccagcttagtcaaaactgtgttgaagaccccagactgatgcttgtgaagtctttggcaggtatcacacacatctccacatatgcttttctccttcaattctatgaacttccatggaaagctaaagtgttggcgattcagtcctgggcatgaagtacagcaaacgagatctatcttcatgagactcaaactgatctaatggcatgcacacttcatgtcctcccagctgtatttttatttttgaaaaatttacaggacaaagtaagtcctattacctttctactgtgttgtctgtctaccatgaatttctggtgacattttcaccctcactgcaaggaacctatatgaaactatctcagcaggacttggtaactttccccaaccccctctctgtacctatgagtacagattgtaaaggacaatacataggactggttctctccctcctccagttcccatgggcacaatttaatatgttttaaatatttcaaattcctttgacttggtagctggaaataccaaccttgctataccatcagcatggtataggaagtataatgtacgtaggaagtgtgtataaattatatattcctatagtgtgtgtgtgttttctggtattgagccagtctgttttagaaaaatagcagagaatggaacaaataaatttcttttaacctaaggcagaagactcagaaaaaaaaaaaacaaaaacaaacaagaatatggagtaaagagagggtattattaggtgcgtatgagttttaaaactgcatatataaaaatagaaattcccaaccatttacctacgttaatttctattcttcccttaatttcccattcatgaacataagatgtaggatagatgattgtatagagataactttttaatgaagggaaaatgtcaatatattcaaagttacattaaggaacatcctgctatctcattgttcatgtctgtctgtacagattttaaccatgctgtaaaataccttaggtcatagactatttaacacttcctgaattcaaacataatgctagtgttagattaaaaaaaaaataaaaaaccttttacaacagaattggggtgtcttcctttctgatctatttgtccagaaatttgatctaacaagactgaagataagatgacacagtggccagtgctagacagaaggaaatattcctgacccagaaatgggggccctgttagtctactggtgacatctggagctagtctagcaatctttccatgccatgaactgactttgataaatttgtaactgagttcaatagtggctgtgataccctgttcccatgatatgcacgaaggcataagccagggtaaaatgctatccaatggcatgcacaggcatggaagacacacataaggcagggacctgggctttcattgagtgatcctgggaatcctggtcctactcaaaaaacatggggcaggctgccatgagggtataattttgattttgtgaaaaaattaacactggtattgtgttatcaatgactaaatgcttaataccaacccattcaatacgtagtaatttgtagtcataaagctgttaatcctattcaaaaagcattgtacttacatgaacatcaaaactgcatcaaagttggaaatataactgcaaggtagaaattcccaatactaccaataatgaatgtttttgattcttctccttttgtctctataagattttttttttttctgaggtggacattctatatctgggcttctccgcaaagtatcagttcacctgacatgaagagatactcttaatgtcccctgccttgctgaacagataaaagaataaaggccaagaacacatctaactactgtcttcatttcagagaaatttccccctatcttgcaaataactacctggaatttgtagccctcttaacaaagctgaaactccacatcccaaaagcaacttagagtccaacagaatgaggcagaaacagtagggagggctggtgtctccctgaaaaccaagtggtgaagtccactgctagtaggctgttcaagcccacaagaacagtaatcaattgggcttcaggccatggccactgaatggcactttccagttcacaatggccagtgatctgtgtggatgctgacaaccagcaaagcatcagcatcagagcaaacatcagagacgtcacacccttggagagtctcagtgttctatcacatgctcttaaaatttttgcttgtttgtttgacacagtgtctaactatatagttttagctatcctaaagtttactacatagaccaggctggccactgcctaactctgcttcccaaatgctgggattaaaggcattcaccaacacgcccagctctgtgacatggtattataatactcttctagtgacttctcttagaccttggtaagaggtcaataactacatccatgctgaccaggaaaaagcactttaaaaaaaaaaaaactgtgtttaatctccaaattagaaaaatattaaagcttgtcctacttagtgtgtggaacagcaatggcacccttagctgtttgacagccctggtgctagccaggacccagtgggaaaaacagtagttgagtctccccagttaggtgatgtacagattctactgtcaaacaccatgactcttgatatcagctaataacgggaaggaaaattatcacaagaatactgtgagccaacaagcttcttagttatgtgatgtaaaccacttctagaattaaataacttaaaggtagacactatcttgcaaatgcaggcatgtgttctaaatacacgggcctctctgtatctatgtgctgagacaaggtgatgagaagcagcctatatgggtgggtttttgtaaaggcagatgtttaaccccttcaaggccaaatgaagtctgaagaccagtttgaaaggtacttgaatgtttccactgtgatgtgattttctgttaaaactataggaaggtatactgggtgggggcgggggaacaagccaactataaaaactgtggacagtaaatcctttggccaagttctaattcacatgtgcaacaggaacaatgagttgaaggaatggctgttcaacatgaacagcaaagacagaacttaatcatacgtttcaattaaaatcctgtgctggggctggagagatggctcagttggttaagaatattgtccactcttccagaggacccagggagttcactggaagagatcatctgttatttcagttccaggggatctggtgccttcttctgtccttctcaggcaccagacatgcacatggtatacagacatacacaagacacacatacacataaactaatgatcttaaaacatacattatttgtaaaatccagtgcacaactggtgacagaatcaaaaatgactaacaatatttagtagccagagccaactggcatggttctgtccttcctgcttcctttcagataaacagccccggggatgaccttttatttatgctaaaatattatcttaagctgaatttcaaaccatgctatataattactgtcataagaattaataaaagtgtttaaaatctaggttaggagaataattcagtcagtacagtgcttaccttgctaacagaagacctgagtcaatccccagaagccattaaaaaaaaaaaaaaaaaaatgggcatgttggtgtcaactccagggcagggaaggtggagtcagtcactggctagtttggcctactcagggagttctaggagataatctttagtccatctcatcctccctccaaatacatgtccatgcacacagacgacactttaagatggggcaggggtcagggtaggggttggcttgccagtaattccaggactgggtggtggaaacaggacaagctggatagttagactagatgaatctttgtcctctgttcagcaagagtccctgcctcaggaaatatagtagaaagcaactgatggagactcagcataacaacctctgacaaacaaatctgagtacaatcatgccacacattcgtaattaaaatacttcatatcacaaagactgaaaatgagcaaacacactttttaaaacaggcaaaataatactaatgaatgtgtacatgattttaaaaagtctggactaggccgggcgttggtggcacacgcctttaatcccagcactttggaggcagaggcaggcggatctctgtgagttcaaggccagcctggtctccagagcgagtgccaggataggctcaaaagctacacagagaaaccctatctcgaaaaacaaaaaaaaaaaccaaaacaaaaaaaacaaacaaaaaaacaaaaaacccaaaaagtctggactattactagttaatagtctacccaggcagcctggagacttgacagcatgccactctaagacaaaaatcaattgggataagaaattgttctgcttatggcagttaagagatgaagtagtggtctgtaaggtgcaggtaaggaaaaattgggagttctgttttagagttaatgaatttctggaactctaatgtagatttgtatggaaaacaaaacataaaggtttaattgcttcaaaatttttattccttgcccccctctccacagaaatcactcaacagacactgttaatacaagtccacagtccagtaccatctctgtgctctgtcagtggtatacattagcagggtccatttgcattaatggaacatacaatcatcacactcgtgtctttgataatgtttcccaatatgaaagctatgatggccagccaccaggaagtggaaaaatattaattggtgttactgtattataaaaagcctcagttaaaaatagcacagtggaaaactactagacaaagttctaggcaccataagacacccactcacagtatgtgaaaattactggttctcagcctatggttactacgattttgttgctggaatctccctaaccccttgattttcacaggactgtgaaaatgcttgtgtgacagaggaaattggtataggaggtggcatttgatggcagaggtagttcctgctcttgggaagcccaactcttataggcaacccttgaaggaaacagatgagttgcaggtgatgcatatccgtgtctttcctatacctttgctgtagcttccaatgactgtcagggtctcatgtgacttaaactagttgtatgtaattgccctcaccagctcacctctcagaacgcatttatccagcatacgaattctccactggctcgggatcatgcgctctccaacgtgcagtgcctctgctcagggtaactgaggagagtacatgtaggtcaaagccagcctctggagatacttaaactcatcccatactctgagtaacatttagagtactttactcccctacccttcggtggatgatctcctctaatgctttgccagtttttaaatatggaacataaaactgtgaattaaaatccaaaaacttaaaggccaaatccccatggctcctaatgttctctaccatattcctctcatgcacctgtttgactcattttactggtgattttgcttccagcttgctgattctaataaagagtagctaaaaaatgtaaactgaggctaagcctcatagaccagcattttattattctttaaacccggatgtctaggcacaaagctcttgcttaaattactcacaaagtgaagtgctttcaaagtcacaatacagattagctacccagctctgcagggctgctttaacaggtagggagaagttggcatggtacacccaaaagaagaattagcaagagatgcttgaagtctgagtatgtgttaacctggaataaattacaatgggtgagaaacaggaaggtaaagttaacattaaagaatgtgttcagatacagaaaagcactgagaggagctagtgctcttcaaaggacaatacttggattgttactggttcctctttatgtcagtattgaccatgtagaggccagttttcttctgttgtttctactctcatctattggatgctatgtgtaaaacacttgatccttatctattccctatggaaggatactctctcaggctagatacatgggggagtcctgccccaaatgatgtgacagactttgatcaggagtggaatggggggatggtgaaggaatgggagagaggagggagaggggactgggattgctatgtaaaataagattgtttttaatttaaataaaattaattttaaaaaacccacttgattctattccatatgtacttaagcacagtactgtgacacataatgtgtggcaggtaaggagaaactcagaggcaaatatttaaaatgcaaccacacacacacacacacacacacacacacacacacacacacgtatgcacctgcactcggtatgtagaaatgacagtacatttctacatcctcagaactcagcaggctgaggcagaaaggataatttctgatttagaagacaataatgaaataaaaccagtatctcctacataaaagagaccccatttgaaacaacaacaaaccaccattataaatataacaaaagggagggacctggaaaacagatcaaggaaggtatccctaaatcacaaatacatacaaatcttcttggaagctatttacatgtcaattaaaccttcaaatccctggtgcctccagaaggaaattgggtgagattacctcacagttttggtttacatcctgcacaaggagagcaggaactgagagcctggctgctggccaggcacaatgcacacaaggcagttgtgtgcactgccaagatggccgtctgtcctcacacaggtgatgtccagactaggccgaggcctacaaaaaggcaccaacagaaccagctcagagacatggctgccctgagcagcattttctatactacaggatggtcaatgatttattgtctgatgcttgctcttcttgcttgacattaaaaaatactatttcctagctagacttctgctaagggatagtaagtagctctctctactagagtgcccagggggcactccaactctcgatatggctcccctagttggttctcaattcctacatttctttctagttcagaagttagtaattggagggaagatacccggccaccataccccaacaataaaaaatcaaagctgtgaggtgctctatcttcagtcaaatccagaaagagctactgataaatctggtaccgattaaccattagcgtgcatttagacttagtttatataagctactactttatctgtttgaactagttgtaaattgtttatctatagaaggaaatttgaaattgcaaaaattatgttcctagagtacattattaatattcattctgattattataaaaattctaccctcacactgagagacagataaaagacaggaaattcacaacagttttctgatgttctatttttcatgtcagtaagtagatgagctgcaaatttaaatgcataaacttgaaggattgtgatctcaaagcaatgctttctataataattttagttgtaggagaacattttaagaactaagctcttaccaggcagtggtggcgcttgcctttaatcccagcactcaggaggcaggggcaggcagatttctgtgagttcaagaccagtctgatctacaagagctagttctaggacaggctccaaagccacagagaaaccctgtctcaaaaaaagaaaaaaaaaaaaaagaaagaaagaaagaaagaaagaaagaaagaaagaagaaaagacctatgctcttgcagaaaaagtatatatcaagaacacaggaccttttctttagtacctccttaactatttctcattactcctgaggggacataatatgatatttacattaagcaaaggcaagtattttccccgctctgtttatctggaatgatgttcactaaatggtgatgacagcagtttctcagggtcaggattctgaggaggcttccaaaaattgtttataataactgactttttttttaaggtatcattaacgccccccataagtaaaatcattatcctgtatcctgaaaatattttaatttccacataattagtggcatgaaaagatgctaaaagtaaaacattggaacaaaagttctaaaataataacattttttattttaaaatccatatgcataagctaaattcttcccaaactcagcaaaagtgtgattccaaatagtgaaagtcatcttaatcaaaaagaaaaaacagaacaggaggaaattcatcacttgtatcattatataaatactatttggggcaagatcttgctgaccaagaactcaacaatccccctgccccagcttcaggaataatggggtaacagctgtgcatcaccatacccaagtcttctaacttgatctttactagcatttgtgacttatctacaaagagctgcattacttgtgtaatttaaaatcaataaataagagtggacattaaaaatagatccccaacattttactaggataaagctgagatttaatggaaattttcagtgaaaaatagtgtcaagagagcatactgaaagccagtataaagattccactaagaactgaaaagagaactcatatatgacccagctacagcatcctgggtatatacctgaaggactgtaaatccacacatgacagagacactcacatgcccatgtctactgctgctctggtcacagcagctaggaaaaggaaccaacttaaacagtgagattccttttactacagcaaacttcttttggctgtgggcctataggacaagacatcttggcagcagcagatagcagggcaaattccagggaccattgttggacagcaaaaggaggaagaggaaggtcagaaatcccacagtcccctttgtcccatctcctagagttcctacagcttttcgcctttaccctaggggctaagcctttcacacacaggctttgagaaacactgaaggtcctaattacagtagttaatataataatttctgttctttgtaaatcatgacactactcaactttacccagaggacataagctaccaagtacacagaatcctgggctaagcatgtaagagagaggacaaagaatttgatagtttgaattagagtgctaattcctaagataactttggttcaagattctctatttcatcctggtgtagtggcacatgcctttaatcctaacactgaaaaggcagaggcaggaaaatctctgtgacatccaagccagcctggtccacatggggaattccaagatagccaaaactatacagtgtgatcctgtctaaaacaaacaaaaaaattctttacttcaatgacttcatccattcttcatatgtattacatacacaggcagaaggcaaatttatactaaattttaattttatggcctgaggaatatagatggaagtagagatcagcatgttatatatacagcatgagccagactgagaaagacaaattgcccatgctttctttaatcatggtatctacatttaaagacatatgtgcctatgaacatgaaaaccgaagggaactgttatgggcctaaaaggggaatgataaggcaatctgaagaagaaatacaaaatattgcatgcttttctcacatgaagaatctaaatttaaatgttattatataaagtacaagagcagaagggagctgttggggtgggggagcagggagggagaaacaggagtgaaaggggtatgagcaaaggaaaatgtcattcattatgaaatctattatttttatgttaactaaaagttagcaaaacaaaataaatatactttataaaaaaacttcatggcatgaaaatttctacatgtgtcagtatcttaatgtccagaaaccttcagatttcagaacatttagattttagatttctggattacagatactaaacctcaaaaggttttcccaaaacggtcacatttctcttcccactgcctgctgctctgtgatacagcaatacaggagactcctgtctgcccagcctgaagcctctttacttttggtagaacttgagccaagttccgggaactgcagagacccaagtggtagaaagacacagtgctggcagctaggccagcactactcatttgtgggaaaggactgcttagacttgagtgtagcactatttaaaaataactactcctggggacagcagtgaatgactataatcccaatacttgggagacagatgcatgtgcatagtttggggccagccttagctacagagtgagatgtaggccagcctagactacctagttatgctctaactcaaaacaaacaaacaaaaaaacaactaaagcttccttgctctggaatggttaaaaacctaactgttttgccaagacagctgaaaaagacacaggcactatcagaaactaacctcgaatgccgtccaaagcccacagtacgcctgggtcaagctacagtggcagtcctgtgtttcaacactgcagatttctgagaagactaggttcaactttgccttttattttcttctccagcaactgaagagtataacctttccaaatgacttggagactcatctttaattcattttttcctgtctgcgaatgtggacatttttctctgcaaatgctcaaatgatctacgttgcattttttaaaatatgctacatttatccctgagccattctggatgtataccgcactcagaaattggttggctgaaaaatgactttaaaagacaggctatagtgatgtgaaagaatagtacttctagatacagaattcctttctttacaaaaaacaaaaaaaaaaagtcagcatgtaagtaggtgggcaggtgcaagctattgactatgttttcattcttggatgtatgtttggttataaatacatataaataatgtatttatattaatatggttttatgtatgaatgacatattgtaaaacaaatacctgaagctggggtagtagctcacggcacatgggatgctgttagggtaactgttgtgacacttagggcagtctggactagtgcattcccggctacctgaactatatataatgcaaggtgctgtttcaatgtccatctcacagctatctactagtgacttgacagcctaggtcaggaaatgtcttagtctttagggcagatgttatttgggctggccttagagttggcaggagcaccttctttgtcttccagctctaggtcataactcatattcttcctctccctttatggagagaatcagagagaacaagaggaaagcaggttaagaagactggacactgagcacagtagcatgaactgctctggggagggagtatgggtttcctgccactggctaggcccacaccactgtacataggcccaggcaatatgcctcctgcattcatgctataaaacacacacacaggcacacatggcacatatgttcagtaatattttttgcccctgtgggagttgatatgctagtgtttaaaagacaaataaattgggggagggggtgcaccacaactctatatggtgcacatcttagagaaccttcactgctctgttgtaagcggatggcattgaaaatgaatgctgaaagccttcaaataaaaaattatccagcatctcacagtggagtcagattctgcactaacatttcctgctaggggaaatgggaagcaaggccacggctctcagaacatatttaaaacatcatggtcacacaaaagtgatttgcaacagagtaatcaccattctgcaattttcacacacaaaacatggcaaaataactgcaatttggtataaatgttcctttcaggtatatttcttggagtaagcattatattttattctaatgttcctttttttctcctctttgcctccaactcagttgtaccctagactcgggttctacaatatcattacactaatgctgtggacctataaaggttgtaccgttggtaagttagtatttttagaaattaaacataacaaataagtgaataaataatatacaaattgtgcattcttttaaaaaggcagtttggcatgtcttctgacacatgccagaaatactttggcttgtgctgcccttaacacacaaggggaaactgagtcattagtaaatttctggcaggaatgctagtgggattttttggtgaggcaaagctacccagtctgtttccaagttggtagtgccctctattgtcaaagccatggcttgtccagttatcagaaagctctgcctaaaatgctaagttattaacaagagaacgtccttctctgctatctgcaggtgtaatgcagcaatcatttgtggcctggaggatttattaatcacacttccctaatgggtgctcttggcatataataagctgaaagtctgttggagggtttaacacccctagcaccccagctcttctcagttctaaccacacttgtttttagggagacagcacatatcttgatgagggaaaggacttgcagcccacacttgtggctctaacagtgaggaaagctgagttggacccacagatgagctccgtttccctaactaaaccaacccccacaggctggtacaagtaccagggaacaggataaaaaagaaaaacaaaaacattcctgggctaagaaaatgaatccagttttcatgaaatcagtttagatgtgcttctgagtggagtgcagaaggaagcccagctgatatttgaagatagaaaccaaccttctttcatagaaaagagatgtgctagtttgtatttctgatggttgtatctgggggatgcttcgttgaggacttcctggagaaaacacagagttaagaaacagaagtcgccacatgtaacagcgtgctttctgaggctctgggtcttaggattttcagtttgggcaggacagcccttctccagcactgcagacctctggaaacatggtcccaaggtcagctggcttttggaatcctgggatgctctaatgaatacattcattttgtgatgctatcatgagtatttgcaccttccataggtttccagaactccatgtagaagtacaattcattaccagtagcttcaaaaggacctttgtccccactccttccaatcctagcactccactcctgttgaatggggtcaactaacagatcctgaaatgtctgaatataaagcttttactacagatatctgcaaaaagaaatgtgcaaataaaaagcacacttaaagtacgtgagatacaattatattttcttttatatgttattggaatttgaataacaaagttaaaaactgggtttttactaatgttcaatccattgcctaaaatcagtatcactttatccttaaacaagacatgagatccttttccctcttgaagcaggaaagggagagctgcaggtatttgggggaatggtattctaaggaacagacagagcatcaggtgagagggcagagaaggggctttggagactcaggccaaatcactgcaatgttagagttacaggctctaacacagcttagtttcaccatgatttcaaggccacttaaatggtatttattaccaacatggaggtccacccaagagattcccaagtaactgaaaacataaactctaaatcctgctggagaagattcagctgttgagctgagcagagtgggacagagatagacctttggcctgtagccatctggcgcatttactctgtgggtcaaaggaaattaccttacattggttttccaagtggaagttgaaggcagtctatgaggacctcatagtacactgggtatatgatgaacacactgtacggatgaacttccaggccacagagcagactcttttctgcacaaactgaacagccatttatggccgtgctttatgaatagggttgtgcaatggcttagtcaccagatgtaagccacctaacacccaaagcttttcttttctttttcttttttttttttttcgagacagggtttctctgtggctttggaggctgtcctggaactacctcttgtagaccaggctggtcttgaactcacagagatcctctgcctctgcctcccgagtgctgggattaaagacgtgcgccaccaaagcttttcattcacaacttcacctcagaccctaaacctgagggaccagatgactgtggaaatgggatccttgggtgtggtttctttatcacacctggccctcctctctgttctggaacagcttagccatcctcctacttggtgctctgtcttccttggaacaccatttccccagacaactgcaacttccactccctctttccctccttgcaagggtcatgtctcgttttagtgccacactgatgtttaaggataaggttatattgatcttaggtaataggatcaaattatcacaccaggacaaccctgtaacttaaaaaaaaaaaaaaaaaattcctgcactgaccataccttaccattctgtcgaatacaactggtatcaagtcactcttggaatctgctccaaaagcacacccaatgcaggttactatagtggcttattccgaagaatgtcatgtacactgatggctcacttaggcctatatctggcaaagaataatgcaaagtagcaaaggctgatcctctaaaatgatggatggcctcacaactgagcaagaagacaaggctaaaacaaactgaaaaacacaataaagagactccccacccaacccatactggagcattaaaacctaaagtagggataaaaatgatagatcttttaacattctttctagtatatgtattaacatcaaaaaagcagattacagatgctatgtgaacggcagattcctagtatttagaaaaccacaaacagtgggaagaaattagaaataaaaggcatgaattagaatatcaatataccatattatttctgtgagactagacttgcttttaaatactgctaaatatttattttcaggtataaaattagaatttttaagtttattctttaatattactaataaacaaattgcttacataagtatttgtgagctgtaaagtgcttttctaacaaaatgtttagtgtttcaagattgacactggttgaagtatgtttcaaagaactacacatcttcagacaattattatagatatatatattttttgaaagagttcttggttccattccttgtcaaaagatttgaaatggcattgcatttccccttcaatggaaatgtctggctggcttgtaaacagtcagtggcatgtgtcagaagcaactactgaatttaagttggtgctaggatttcctgttttaaaacaaaactcccaggtgagttccttcagtgtactgtttcattgtaaacttgagatagaagaatgaaatttcctacatccatctgacatcaagaagaaatgcaagctaaggtggtaaatacacagagaagatatttaaaagcctatgaattcctctgtgtctttaaaagctacttttctctgcactgggtatgtcctcatatgaaccttcaacatgaggagaaaggacaaattttcaagtctacgtataattgtatggcttagatccatctctcttgcacagcttcatggtcatctactatggaccagaaggaacaactcatccagaaacagtaaaggaaccaacatacttactgtatgactctacaaggtgtaagtgacttgaaatgaagagtgagtgagtagcaacatgcagagcctggcataaggatcccgaagggcagaaagttctaggctagtttagacacataaaatgtcactgttaactaaaaggtgtgctgtgtaactggaggaagatctctgttagaacagataaaaaggggcatggtttagtggcactaaaaagcaggatagaacataggagcactctacatcagtggagcactgctcagtggaactccccatgcacgtgtgccctccttcaggaaataaccacacatcagaactgaaccaccatctggagagagcacgaaccagctacttgccaccaaatgccttttggcaatactttataccctgaatattatttcaaaaataatgaaatagcttccaacactgaatgaggaatatttattaaacttctaccttgtgttttttccttaaaaaaaaaaaatcaagagacactgggcaaatcaccacccacaaggtaagaaagcagacagggccagtggcagctgccatctgcccagggacacacaacctctagtctgctgcaagttcatcactccttcaagcctgatttggactagttttgccacacagaacaaactttctaagaaaggctgagaggttagtgagcacatccaggtacaaatctgcagactgaagggatgagaagctgtggttgtgcaaagagtccaaagaaggttgggcagggaaaagctttgaaagtaccaagtaatgatgtggccaggagagcaatgagggcaaggagagggcaggaagacagttaaagtgttttagcaccttgctttctcctttgacgaggtaagactagagcaaaaataaataaaatgcatgggccttccatctaaatgaacaaatttttccccttggttaagcctcacattaattacagcctaattaatataaataacattttcatgatgtttcaaacttatgagtatggtctttcatctaaccctcaaccacagttctataagcagggtaggcatgcaactatcttctcttaggttaggaagctgaagccaagaacattgcagggatggaattcagacaggattggacttgactcttgccagtataatctgtggcctctacacctctcaacaatgacctatgctaccttgaaatgatgctgcattgcttcagtcttcctgataccaacaaaaccaggctagtgatttatgagcatttttgccttactaggatagtatttctctgagcaaatccatcctaaaagccttaggcggccaggcacttgctcagcctgtaaggcagtggtcagttttgtctagaaactcccttatttgttcatgaaagccctgcaaatattttggcaaataaatgcagaaagccggaaacactaattattaggcagagacaaacccacagtaataaaataaacaacaaagtgccttttcagcgcagctattcaatgtgccttcctgttgccagtgccatgaaaaacaagaagggaatggcctggaggagacaggaggaaatgactcctttacagacagcgtcctgtgggcagagtgtggccttaggatctgctacaacagatatctaaaaggaagggtgggcaatgaaatttgcaatgagaaacaaatgattgggggaaaatggcgttccttaagaacactgttaaggcagggcacttacaattagttctttaatcatcaactcaaaaaaattttgggaaataccaatattttgaaaagtagtgtgtgtgtgtgtgggggggggggattgttcaactagttgtcagtacctgtaaaccaactagtccactcttgagcgacaaaagcttgagtagctatgtgatttgtgcctgtacaaaagtacatgtacactggagttcaccctgggacctgggatagtatcagccttctgggcatcaagctctgtaaggtcctcaggcagagaaggggtataatttgcctgcctgggggcttgagatgcctcttcacctgctccaatgtagttcatgtgctactaatagcaatcctgaactaaggtttatgaagctatgtttgatgcccaggatttgagaactagccatggaggactctgacaaatcaatggattttctagttcacgctctcagtctttaacaatgagaacagcccatttgcctgcctgtctccttacagccattgtgatgccaccaccaaaaaagcccaaccacaattctttctctaatgtgttctgttttccaaaatgccttcatatattaacactttcttcttgtttgtgtaagctgaagatgaagggtaaagattatgagtgtcaaggacaagctaagaggtcagctttccaagcaagttgtacaattttcatgtgtctgaatctaaaccactctcatggatcactgaaccatttgacccaggcttagagtgcaactagcttaacaggcagctgagtgctggcatctctgaggcagcatttcaaaccccaaattggcttgtttctcctgacagacagactgttgggatacagattcctagccaactgcagaaaagctggcagctctgtaccccttccagagtcagtgtggccagggcagtaccggaacaactggtctcattgccttctagggtgacaattagtagtgtgccaatcctttgcccttctgaggctgtgaccgtagcctctcagcagagccagttactgcatcgcagactgcacagtgaatggctgtgggcctcccttaacacagtctggacagggtctgagaggaaagaccttccaagatctttgattgggaactcagcaacagacatgagccagcatgaaatgagatgaacaacagtaaaaagcattgatgatggagaagaaatggttccataaataataaaagaagaaagcacaaatgtttcactgagaagtgtctccaagtgtggcatgaagagaaacatgtagtgacaggaatccagccccattgatgaaaattcaagctcagtgacatctccggtgtgctttattaggcacaagtaccaagcgcactgctcaacacaatgtgaatgagaacatatgagtcacaggacagcacctccctcactctagctgacagccaaggacaccactttacagcaggaggggatgactgatggctcccaaggtttttccagaaaggaaactaatatctcactgcagggacagtgaattaaaatatgatgctcaaagcaaacactctaaaactgctttaagaatatatctatcgaacactagatgcactctgcagtgttgcatttctctcaagctacaaatacagccttcatattgtggtggactagagtatgttttctttcctaaacaactgtcacatgtactgtcttgtcaacctacatctggtcccttaactgctaccctgtttgaatttatactctctctcaatcacaactccacaagacaaaggctggcagaggtgacccaatcaacaggctagatgagctgttcttactgctcatctttttttttttttagagtacttggtattgactctatctaaactgctcttccatggtttctaatacccctttttccttgttctcaaatacttaagtactaaccttcctaggggtgttgcacatgagctccaccgggtatcccaaaggtctattacactttcagatcaacatggacaccttctgtctctatagtccctattggttcgatgtatgattccccaatgttctaatgttgtcttgtttcatgtactaggatctgtgtcttgttcatggcatcttctctgccagctagccagtcttagttccactctgtaccctaactaggaaccattctcccattaccttcttgcccttgcttaattgtttccctcctgtcttcttaaccactgctttcaacccagacctctttctatgtggatggcggcaatggaatctacaatcatcatcttgcagtaagaaaatctttcaagtctattctctgtactaacacaggatgatgttcactgaatatatgttcaatcagtctatgaaagtcctcccatagctccgcaacccacaagataattcttctgacaggaacttcttgacatgctcaaaactcactccttacttttctgggttttatctcccttttagttctccatactgggtaagactactcagaccatgctttctctctccaagcaagagtctcttcatcttgcaaggccttaaaaccagccacttgttcttcaagacccaactcaatggctacctttcctcgaaagtacaatgtctccccaataccatcgcagagacagcattcatttctctcccacagcactcaggcatctctagtcccacacccacctcatatagtgtttgcaacttcattggcaacagggaccactacttttctttctcccttccctagaccctactcaagtgcttagcatctcatgtataataaatgtttaaacaggagacaaacagatgatgtcatcttggcctagaccttccctggtgtatgtaacttcacattctcttgctcaaatatgtttatctatttatacttactcatctattttatcaaacatttctacaacatggaaggagaaccagttaatgtatacgatttggcctcaaatcctaagagaaaattttgagtgccaggtttgcaggatgcttatcatgtaggacatgcctccttcccctaccatgaaattgaaaatgttagaacttaagtctaatgtgtgtcatttctcagtattcaggttaagtgtgtcagagaagccacagctgtaggtgtctagagaacaggtggaatcaggtggggtgacacatgctgaaaggctaaagcaggacaggaagataactcaaggccagcctggactactcaagaaagcaggaaaggaagaagaggggagaagctggactcaaatccagtgttacaggtgaatgacatcaaaagcattctaagaccatatttctattgttctagtttatcgtatatctgtgctctaataaccaagttcctgcttggtctcccctgtcccatcctagcagtgatgacaaatgctgacagctgcataatgggggagtgtgctttcttcttttggtttgcttctagtcgctctaaagtgtacctttctcccagctcccttgctgcactgtgcagcctggtgtaatgtgtacttcaacaccaatggagacagaatctctgcttcagtggattgtttctggggacattccttctctcctattctgtcctagctcagtttgagggggaaaaaaaatccctgttcttaccaactgagtatttaaggaaacaagagcaagtgctgcagtcaatggaatacagaaaacaagatctcgttgcagatatttgaaatgaggattgactactgacaaagtagcaggagtttacagtttgaaagagaatacgaaaggtgtcagagtgctcaaacatgggaacagggctggtggcctgcctgtatccaaacagtgaggtgacatggacagctctactctgctcctgagcagtgctcctacagtcccttcttttcctgaactcaagagttgtcaggtacaagtgctgtggcaaagcaagagaaggggactgagcatagctgcagtgggagaaccaggattcctacaccatctgttctgcctgctcaaactcagagcacccgacctgcagcacagcggtgccatggattcacagcctgatggactaacactgactatagtaagagttaaaaagtggttcctaccactcccctttctagatcacattgcctaactaaggtttacactatgtcattcttacatattagaaaatggggaatattaattctactattaagctgttatctcaagggaatttagttaatgctcacaggacctacctagcaaaaggcaaatggctaccatgcctgatgacatgttgtcactggcaatcctgcacttctttgagaacacgtctcagcgaatgttcagattctgactttgaagtttgcataattttatttccaaaaccatttaccatgagagcaaagcaaggaagccattctcttcatcaagaacaatgcagtcctcctgagaataccaacagatcaacagcatcatagtaatccttggtgcaaagcaagccctgagcaatcttctcatcaacaggaaaatggaaaagtaaagtatgatatgcacaactcctagtcagagccacagacgtgctggatataatatagaacaatggtgagtcctatgtgttcattagttcattaaattttaatttagaacttttcaaaattactccaaaagaaaaagaaaaaaagcaattaccttatatcctctctgtcctatttctaagaatctttccattattacataaaccacctaaatgaactttggaatgcctgcaggcaagaggacagtgtgtgctacacctgttggcatgataataagaaaccactgatacacaaaaaggtgagtacagattcctatagatattattataggggaaaaaagatttatggggcagcaaacccaggggatccgcctgtctcttcacccccagccctgggattacatgtacatgccagcttttatgtggacattggggatgaaatgtggcctgcactttactatctctaaaactctcgcctacttcttaaaaactgaaggtccaccacatccctttctgaaacacataaaattttcagaaatgaaccaggtatgatatcgcatgcctttaatcccagcatttatgaggcagagtctacagagtgagttctaggacagccagggctacacagagaaaccctgtctcaaaaaaacatttctacccatgatgttaaaaagaaatgaaatgaatgggttacactaaactaaacacagatgaataagcagtgctgtgcatgtttgtgcagttatctgcttattaagtacttcaggttccatttgttcatgcttactttttccttttaaatagcccctgaagacagaacaagcaagctgtgaaaatgtccattttctcagccctggaatgccctgcttatcagaagatgaagctaaggttagtgtattttctctatacagacactccttacagcacaatcaagtcacaatattgaaagtctgctggagtaatgtgactagtaccatgtacagggcctgggtgcagacagcataagtcacagagtagtgtggtacttgagacagcgctttgctactaagagaatgcaatcagacatctagaattcgatttatgctgcacagaaatgtctagtgtaatagaaattccccacaatttcacagaacaccggtctttctggtaaacgggcactttaaaaaaaacaaaaacaaaacaaaacaggaagagattattttttgtaccaggctttttggttagtggctattttccttgtctcagaaatgacttcagtgatatgtgaaaataacagtgccctgcttcagtgtaaagaaaccacagtttgctatcacaagaatggtcaggtgtattccaacaagaagtttagctaaaaacacattggaatgttagaaagaataaaaagaaccacaagaggaaagggagaaaagctagaatcacatacagtgaaagcaactacataagacaaaccaatcaaaagaaacagaccaatgaatgatttttaatttgaaagctcagttttacaatgaacaaacaacaatcattaaaaattagcatgtctgggtctatacaagcactttcattctgcttctatgggtgaggctatgatcatagctaagagtttattctgacccatagtgatcctccagaactacagcactcaaaagaagtgtctaatttctcaatctgtaacttcaaacccaacttgtccctgtgaaagccaaacatagttcccagagcaagggagataggtatcttatatgtacatgcttggtgtgttacctacacaaagaattatggaaagtaaaaatgtgtttcctatatactcatgtaggcatatgcatatataggaagacataggttatatataaactataccatatactgctatatatagttatatttgctgtattgtattatatattgtacattatatataactattatatactacatataatatataatatatatagtagtatatatggaagtatatgtactatacatacaagtatgtatatactacacacacacacacacacacacacacacacacacacacacacactaacatattattagctcaacctcttaacaagctgggaaaccttgaatttgtttcctggggtatgtgagtaatatcagtatttcataaataatttacatctggcagcaagtaacaactaaagattattttctaataaccatttaaagatgttagatcttattctagatttcattttatttttatgtagacttcagaaacacaaactaatctctttggacatgacaagagaatggtgggaaatgattagcttccaaattgaaaggtgtattttaatgtaatgactttaaagttatctttataatatataacctgaaaactttctaaatgagtttgctcagcaggttgttagaaattactttaggaagtagtcacattgtatatccatgaagccctggttatcttttcattgtttaaccttgcaagaacaataacatgaaacgcacaactatttaaacatggcctcatttcagcaattcttttaaatatttctctgtagttcaaaggcagctttgtgaagagtggcaacagtctcagaactggaggcgttagtactgactgaaccctctcctcttccaaatcttcacggctgtgcccttacctactcctcatgagaagccagagctgaccttgttggtcatgcccatacctctaacccggcaggaaacctagctcgtgctggacaaaacgggaggaggctattcaggctcattagagctcaacatcaaaaaaacccaaacatggaattcgctagacagttttcatgatattggcatcagctacctcaggcccacttctttagcaaaaagggatgttgagaagttcagtcctattaagagataatctgcagtttgaccccacttcttggctgtgtgaagttgtcggtagactgttaaaacataaatcatgattcaaatctagattctgtaacttgcaccgatccaggtcatgcacattggccacactgtagtccagtctaaaaggacagggaaggaaaagggacaggagaggatcaacagagaacaagttcataggctgccacctaaatccctgacctgaatgttgataatgaaaagaaagacctttatagtcttaaaaagccactctctcttctatttagcataatgagaaaacaatttaaaggtagagcagactatgatggcaatgaaggtttttgtacccaagttttgaaatgaggttacatgtttcacatagcattaggttactttttatttctgtacaaattccctcaaagcatttttaaacagagctgtcagctctgtttgtcccaggccctgatttacaaagagcccatgaatgggagaaagtaggaaagttactgcattttcattacaaacttgctttcagttcacccttcaggcactcggtggctgagctctctgctcacatcaaccctagcaggcaggggctgggaggtgtggggactggagtggaccacagggaggttggttttcagctttggcccaagcatgggactgagcagaggtgtgggttgtttttcctctcgacactgagattctcgacccagaaacagaactcaggaccatgtaacccagagctccatgctatggatttcaatccaatacacagcacaaacctgctggggaccactgctctatatccagagtagaaagagagctaatgaaggtgccttcagccattgggtggctgtcactagccctctttccctctgggagactgacatccttatactttctccaccaacctttgcttagcacactgctgatgacactcttgggtggccacaggccctctctatcatattggatacacaagtcactgctaggagtgctgcctttttctccccagccacttcagctgtgcctcctccttccctgtggctgctttctctccttctgtgagcccctattggcagtcatccctcaggaatggtatctcttctttcacagcctgaccattctctcacctgcagctaatattgcattctcctggtcctctagcccactccctcctctaagtttctcaatctgttttgtatgacgctttaggcgactcaaggcagccaactcgtcccttggcctcccgatttctccacttctgttactgtctttttctaggtattttctgttggttccagcaagcagctgtaagcatccacacccaagatccttttttgtttttcatttatcctctacaactaccgcagtggcaaagtcctatcggtctccacactctgctgaaaagtggtgccccatgctgacatcacctgtgcgataccaatacctacctgcctgaaggctctaaacagttccctttgaacacaagtgtccctttcttgctcttacagcatgatcatacacattgctgataaataacaaaataaaagctgcaagttggaagccaatgaatatgcatgcttataggatgtttaaaattacttctccatgaagtcccatgatgtgtcttcatttggatttcctcatagaaggcagaatgatataatgatatattgattagcttcattaagtcagcagcctactttgacacatttatctgtgtgcccacaacaggagcctatcaagcttagtaagccattagctggaacctgaaaacaggttttaataaattcagccccaattctaatatgaatcttttctttgaagaaacaatggtgacctttgaacataaggatgcaaactcttagacctgctaagcacagacgcaaataaagaagactaccagttccacaaaaacagctccatttggtgttcctttgtatgtgggtaatctgtgcagccgtactaattcaacagaagtgtaaagttttaaatgtgcctttcagctagcgccagtcagagaaaatgaagcgaagtctaagcaggatgaagaatgatcccagaaacctgcttttcagctattagaggccttaaaagaagaaagcctgcactggactcagcacaccatttgtgagcaagcaaaatgataatattctgctctggatttagtaaagaaacatattattagaaacattaatttcttgagcaacaaaaacctatataaatataaaaaatccataacttatatatcaggaattacagaatagtaggttatacactatttttcaaaggaagtgcactttctagccttgcccattcaacagaaaatcaagactctctatcaatactcccctagcacagaaccagtattttacagtagcatagtccaagaccatctgcaggccacattggttgggttatatagtcaaggtaagtggtgaggcaagaagctaaggcatccccctaagttccccatcaaggaacctgtgctgtaatgttccaggatgcatgtcaacagaagtcatggcgctgcctacagatacctttggaaacctcatcaagtaaagtcatcaaataggctggggagacagatgtggagacagcaggaaaacttcaggcaacaatagtgtctatgtgaaaaaaacacaaatgttttcctaacaagcagcatgtagctaacaaaggtaggatcatttaagaaatgctttactaaatacaaaaaggggaatgctgcaggttgaaatgtaaaacaagaatacggcttctgccccacctttggactctgttatgaacaccccacccatattgacactcaggcactattgagttctgtggttttcagagagtaaagattcagaatggaggtggtgtggtggtgtgtatatataacccagcactctgaagactaaggccagaggaccccatttccaaacaacacagactggcacagtctcttcccaggtgacaactgcagcatgctcttgctggtcccttctcttccctcagcccactcctaaccattgcattctgactcttgtttggccaggggacagacagagacaaacatttagcccagtgcccctttcttgcagtttcactttctgtggtttcagtcacagttaataaccatagtccaacacagtaaaacagtacagaaataaacaattcacaagttttaactgcacattgttctgaaataattcaaagggtgtgggtgtgggtgtgggtatggggtattgtggtttgagacagggtttttctgtgtagccctggctgtcctggaactcacaaagatccacctcttgcctccagagtgttgggattaaagatatgcaccaccattgcctacattaactctggtactatattcaccaagcatctaggaaagaagagtctactcaggatgcaatgatacccttgtttctagtatccaacagaattcttagaatataccctctttgagtatggaaagatgattgtatttctctggctccttccacacttgatacaatattctcctaactacagctgtggctctgcttaaggcaacagactatccatctcttactgtggttggcaaagcaatagtccctcaaagatagccaagctcacagaacctgtgaaactgttactttatatggcaaagcaaagtgggctttaatgctgggaagtaatcctggatcagctgggtggccttaaggaaaaaaaaaaaaaaaaaaaaaaaaaagaggcagaggagactggagtgacacattgtgaagacctgacccctattaccacctgtgaacatgaaggacgggatcaaaagttgggtataaacctgattttcctgcacagcctgcagaggaatgcagttctgctgacactgtaggctgaccagtctgacccagatcagacttgtgactaccagaggtcctggatagctttaaatcactgggcttgtatttactaggtttatagcagtgacaaagattgcacttgtttccagctctgctactagtccccttgcagggagaagggaagacaacagaacctgttgctaccacctggccaaatcatcttgctgggtcctcgggcaaataccttttataagcagcccctttataaatgaacactactactgggagacattttgagtgtggagtaagtaccctcgctggaattcagaatcacatatctggagccaccaccccattccccttattgtaagagaaaacttttactcagagctaaatttatgcaaacacctttacatttctcagcaacctggtaatgcacatcttttaactcctttccctacctcaaagtcactggggctgctaatcaagagtcagaacagggactatgagagcacctttacacagccaggtcagtaggacagttcaaagtaacaatactcagtagataacttctcaaaaccgccttccaagaagctgtgcataagtcatcatggcatttctctcatcctcacatacatgtttctgtaaaattactgaacttagaaaggttttcatcacatggcctgcagtgtgaaacttcaagaactttctagctgaattacatgtcggtcttctcattccagaacccacttagacgttctaactacccaggagccaaagctacatatattaaaagtaacatgaccaaccacataacacatgaactgttaaactagactggactataggcagctgcaagggagctatgggaacaagccgcctagccctgccagctaccagctctgtgttccttgagaagccacaccctctcagatctcaatgttcccacctcttaaaggggaagtcacataatctacaacaatcactccaagtcttatgttccatgagtctaaaataatagggaatcaggaagtgcttcaaaatggtcacaaagggttgggcaaggttgagttaatgaaactactctgggccagataccatttcaggtgctaagaataaaacagtgattaacacacacaactcaaacctggagaacctactgattgagactaacctgcagtcctccctccatatctggaagacactgactctagaacttgttccccttcaaatacaaaacttcacaaatgtctaactcttaggtgtcttctgaattaaatgttatagtatttgcatggaacctgtatatatctttttgtgtgctttaaatcatcttatgaatcctaacacacaatactatttaaatgctatgtaaactattaagtgaataacaacacacacaaatgtggtagtttaaatgtaactggcccccataatctcatcacataatctgatcaggagtggcactattaggagttgtggctttgctggaggtaggtgtggtcttgttggagaaagtgtgtcactgtggaggccggccttgagatctcatgtatggtcatggtgccaccaagtgtgtcagttcactttctgttgccttctgatcaagatggagccaacaccatatctgcctgcacacagccatgcttcttaccatgatagtaatggactgaacctctgaactgtaagccaccacctcaattaaatgttttcctttttaagaattgctgttgtcatggtgtctcttcacagctgaaccccaacacacacacacacacacacacacacacacacacacacacacacacacacacactctgtatatatttgttataatagtcaaattagaagacgcagaacacagggcataaagaactgatcaaacctccatcaaatccctcccttcagatttcaggaaacgccagaggaggcagacaggctgtaagagccagaagagatggaggacaccaggagaacacaaacacctaattcaactgagcaaattatgaactcagagattcaagccacatgtgtgtggcctgcatggctctgaaccagatcctctgcatgtatattctagctctctgtgtagtattttatgggacccttgaatgtgttaacaaggggcctatgattcttgtgtcttcaggggagttcttttccttctgttggtttttcacgtccaatttcaatgtgactttttttattataatatatatatatgaactgaccaaacctgttaaggctgcaatctcacaagtgtaaacaaggctcgatatagacacacttttctttgattcttgtatttcagggaagcaggtagcaatcatatttgatgaattctgcctcatactaattatttaccattaaggtgataaaatcagtcaagtgatttaaataaagacacaaataaagtcaggtaattatagccaaaatggtaatggctactcgttatatcacagtattctgtactaatcatggctaagtaaataaactatttgatgtacttaccagtcataactgataaataaaacaacacaaccatcaacaatttgatagttgcatacaataatgcatttaaagaagaatataaacatagaaacttgattggttcttacaatacaaattaaacattatcttgaggtgaaaatggatataagcttaggaagaaactgatattaagttggtcaacatcttgtctaaaatataaatttcaaaaggcatatactgtctccttttggaagaatagtatctatcttgaatttactttccaaagttaattaatgcacccttgaaaatacagtctgattatctatcaataaagataaaagtcatccctgcatttaccttaaactaaaacttaaaaaatgtctgtgtgacttttaaagcatgtaagttataaagcttagagaatatataaaacttgtagatcacagtgggttaggggaggagaacatgcagtcattcccaatgtggaagaaaggaaaaaaaagaggtatgagttcttagtgaaaacagtgtacatagaatgacttgtccacttctctcaccgatgcaggtccttccatgtccccatccacctgcatgtaatcaagttcaagccctactacctctttgataaaccatgatctgagcattgtcattccaggaacctagtctaggttcagagagcacttgctgtaccactcatttgtgccaatcacttcaggacaacacccccatttaagtattcatttctacttccttaacttgatgaaaatctccacagaagccagcaccaagcagtcacaaatattgttttccttttctaacctactgaagaactcacaggaacaaaaactggtgaatgttccatcatcactgaaccatcataatccagaaggcctaagacaaattagcctttggcaatacaaaacacctctatgtaaactcagtggagccaattccactcaagggtggaagacaatcattaagtacctgtacatagacctctttctttgtcactgtgcggtaagaatcataagcatctattattaggatgtacttagactttatcagtatcacatataatatatgaagatagcacatctgtgtgcatactaaaagtgtactcaataatagaaacaacagcaagtcacacaactgaattaacataatcatagaacaggtctatagttaacacattttcaaaataaactcttgtgttcaaactaaatatccttggtgcttaatgttggtggccacatttgtacacctgaaaaatgcttttcagacaaaagacaacactccttgaaatagaacaaacatgacaaattctaggcctgaagaaagggaaactgtttccttattgatggtaagtctgttgatcaaataatggtactaaataccaggagtcaagctgtatttgcagacctggtccatatatttcattttatgaacaacaatttccactgtctccctattgtcaccgttttagttcttaatgtatataaatatggctcctaaataaattaatgtaatgtatataaatatggttcctaaataaattaatgtatgaacaattattcactctaccatttcaaatggaaaaaaagcacaaacaactgacatttgtgggaggaaattcagttaaataatttgtagaacaaacctgattaaatgaattcagaaatgaatgtttcctactcgtcaatgtgaagccatttttgctcatagtaggaaaagctagtcccaatccctgagcccttaagaatataacaccaggggacaaagaggacacagtttcctaggtttgtctcagcatttcagagataggaaaattctcacaaaggggcatgtgggagcacagtcatttggtcaacaagattaaatgggtgccatcagctcatagagaattttgcattactatttcatagggtaatttagttaacaggtaagtgatcatacttgctaaatataaatgcaaaaaatgaaggcaggaatcaaggcttggataccattctattttgtatgggtatgcagtaatactgtgtttatgcatgtatgtacatgtacatgtgcatatacactgtgtttgtacatgtgtgtacatgcacatgtgtggaaaccaaaggtcaatactaggttatattactctactgctctccgtggtgtcacccccccacccccgctttgaggcagggtctctccctaaactggagcccacttactggctgaactggatagccagtgagctccagaaacctacctgtctccagcctcagtgctagggttacaaatgcgtgtcaccatactcagctcttatatgggtgctacggctccaaactcaggtcttcatgcttattcagcaggcactgtgctgactgagccatctacctagctcctttaaatactattgaagaacaccaatgtcctagtaaaaaacatttacagagcatttgagtgcttctaggaaacatccaaacttcagaatgtcacctacaaaacactccttaatttggccacttcctactttgtctttgaataatctataatcaaatttccttaatatagttcttttcaatgagtctttaatgtatcttgctactatgagagtttttaagagcaggataaaaataaaattagcttagagtcaggacagctcaactgagtttaataagctactagggtttattgaaatcatttcctttatggataatcaaattgtgtgatattgacaaacacatttgcttcatatatgcaaggtcagagatgtgttctacggtccctctaggtgttagcatacttgtaccctgtggatgctcccctggggagaaacactgtcaaatgctacaataaaaatgtcataatgaaacccattgttttatacaattaacaaatgccaataaaaaaaataaatctaaaagaactcaaatgtcctccaaaagatgaatgagtaaactgtggtataccttaaatagaaaactaagagacaaccaaaaagtgtgtgtggggaggttcacttagatacatgagcatttgtaaaaaccctggaaaatgatgttaatgtattatattaaacataaatatgatccatatagtaaaattccatttctatgaaatccaagagtagaaaaacaaatcaatgtagtcacagaaaccaaaattagttgtcaaggaataggaaactaatgccatacacatgggaaagagtggagaaatgagccacaggttgatggtatgggtgggcacacagcacaaccacagacacagaaagagtggcagaaatatgccatgggttggcagtatgggcatgcacacagcataactatttgtcctaacatctcacagaggatatggggacattttattgacagcatattatttctccaataaattatgttaagaatatgttcaactttggttgtagctctacctgtagcatatgctattagttaaaaagaacagctaaagatggaaacactagttaacaaagaattccatctttttctaaaatcattttaaggcagccctaaatgacattgttatttaccaagttcagacctcttgcaaactcataaccattattcgctatcagcacaagttgtacattcaaaacccaaaaacttgaaatctgaaacactaaaaatctgtaagcttctagcatgcacacacatcacaagagaaataccataatatgaaacttttatatgaacaatttttttaattaaagcatcttcagagtatgtgtttaaaatatacaaacataaatgaatttctatttagagttgggcctcatctcaatatatatatatatatatatatatatatatatatataatatatatatatatatatatatgcgcaaacatttcagaatctggagggaaaaacaaaacaaaatccccaaatccaaaaatacctttggttcccaagtaacattccagatataggatattcagcatggattatacttgtgtaacagggatgaacataaccacctctatgatgtgatggttaaatgtgatggtagagctcagaaatgccatttgggggacggggcggttatatggctcagtacataaggtatttgccaccaccaagcctccatctccaaaacccgtatgatagaaagacacaccaaagaattttttcttaaaagctatttttaacagctagcctaacttatttcttctcagcttcttaaaactactaatggtgtttgtgttttgctttgttgggggtggggttagaatattttatgatgaaatctcagaagggtcttcaatagctacaggcattaattatcccttttaattatcttgttaggcaaagtaatcaaactcagagaacaactgctatagagaaaaagattcttctatagaataacttgagttttggttgttttttttttccctttcaacctaaccagtgctgagctttcgcccagggtgtatgtgcatttccataaatggccatatgcacgagagcgactggaaccttggacaaaacattgcctatgccccaaatgagctcatgtacactgactttagtgctttattttattccaggactaataaggaacaagttttagtcatttattcaaatcacataatagggaacaataatgtccaaaattttctgagtagcaaacactgttatttgtcagcctttaacctcctcctctattacagattaatgcttcttaagcacccactcagcgccaagctgagtagctccagcttcctaacatagaaagcaaacagactggggttctgtctttaaattcagcactcagaaattacacatggtcaacattatctataaaaagccctaaaattcaccttcaaattaccattagcctactaggatctaagttctgagaagctgaagagccaaaagtaagtgttctgtttgcctcacgtcagcacgtcagctgcagcttcccttccctggaggaagggaacacaagccaaggcttagcctcttcagagggaacatcgtgtgtataaatggagcccaccatatgttaaatgtgcatacgatacagttctaccacagaagaaactgttcttcattttaggaaacgcataatgcaaacacataatttattatgaggtatagcttacgagcacattttaatatattttgacacatttcgtttttaaccacaaatgtatttgattgacagagagattatctaattatccactgttccacaaataggaatagcacaccaaagcccagagaaagagagacaaaggccaagatcatgcttaaaaagactgttatgggggctggagaggtggttcagggtttagagcactcgtactcttcttacaggagccaggcttaattctaacacccacatggtggcttaaaaccatctgttactctaggtcaaggagatctaacacctccttctgatctctatagacattaggcattcacatgatgcacacatacacatgctagcaaaacacatatgcatataaaataagtctaaaaaatggagggccatttttaagactgccatggttttgaattactttaaaaagtaatcagcctctgaagagatacaatacatggattcatgtgagagggacttcaggaataaaagaaagggtacaacaactaacatgaaaagaacagagagtcctaggtggagtctgcagacggaagagctggaagaggatattccaggccacaaggacataaagatcctggagggagggaccaactagcagaatctgctcccagggaagacaacatgtatgggaaattacaacacagcagggccttcttctcaccagcttaatctagagaatgttacaaaccccacttaggctagccagtgaaaggacaggagcattttcagtatgaactgtctacttgtttttataaacaagggatagcagctgatacctccagggcaaatgggtttctggaagggaagaaacattattgtatctattatcctttgtgaagactggctttaccaataagagaaatagatattatgtatttcctaatagggctaacagcagaaatgcatttctattttatatttatttgtagtacccctaggagttaaaaacttcaagcaaatgaaagcaatgtcataaaatcatctcaaagctacttagtgcaaataagcatttaggactaagtttgttggcaggcatttttgtctcgggagcatttcaggttcctgagaataaggatgggtggaggctgggaggagggcgcaggggaagaagaagtgacgtgtacagaatgacagtggatatcagccacaaggctgcttttgggcctgatgccaagagaaatccagagacctaagagcagagctgtggctagacaccaaataagctatgggacataaactaacatctgctgcatctatgcccacacttcaagaatgcagggttatcatgaatatacccaatggcatctgtcatgtctttttctcaaagacagaaaatagctacactgcaagaggcacttcataccgttatcagtctctgactggcctcaggtaagcagacaaacagggtaataataataataataataataataataataataataataataataataataataataataattgagtctttcttctatgtccacttttttctctgaaatctaccacctgctgctcttttgggttagaaacatggctcaggttccatgatattctcacaccatgatattctcctggcttctacctcatctctaaatatgcccctttataccagtagtctggaggtatgaggttaaaattaggtgccacgtgtgttaaagggactgagcaggaagagtatctcagtggttaagagcactggcttctcttccaaaagacagaggtaaaatttctcaaggagtggttcagcagtaaggccttgctgaatgcagggtttgatgagtcaaacaaagcaaagggagagccagtccattcacttcgcctcactgttgctattcttcaggggggaagagagaacacagagaagcctacacattaagcagcaaccagctaaccacacaccaatggtgaaatctctgccacctctgactgctaccaggatcaccgtttcatgattttaagactttagaaggtgtggctggaaatataaaccaaatatttgccctttaagtctaccaatgaacaaaaaacactaactactgcttttttcttcctttgtccttgaattattatggaaattggcaatgagaacctggcaggcaggttggggccgttaagttccttaggaagatgtgtctggtctcctctcaggaggacagcaggcagtgtgcagagctcctttccctacaggaagtcacaagactgacctgagaaacctcagccaatgtccttgaactaggtatacccctaatactaggaggttgaggcagggtgctaaatccctctcacaaaatgacaatacacttcctttttcacagttgtaaaacactaacaaaataatgagctcagaatttcacctgagccaataaaagaggtctatcataaccatcatagctgttataattctaaaatgatggctaaacaaacacatcatgtctcctctctaggactgcattaaacccactcccctgaacattggtttacagccaatgtttctgaaaggctttgctgaatgtgagcctttacggtaagtactgcctattaactcttgcttgatctttatctcttcagagttctccaataaccctataaggtaagtattattagtatttctacttcactgaagaagtggggcttgccccaggtcattcagtcataaatcagtgagctggctttaacttctgtctctaagaaagcaattaaaaactacggaaagcagtgactataacagcaacactctctacctgactttcactacttcttaaccacaaaacagaaccttaaaaggtcaaaattctctactcggagtaactgaggggaagaaaaaaaaaaatcaactataaaatagaatttttttcacaatacattaaatgtatcaaaccatttcaactagattaattgtttacattcaagccaaaaccctcatacttggaagcagataagatgagcagtaatcaacactgatctgacattccaaacaacaaggggcaagtcccatgagccagggggtagctgcaatcttcagcaccatgtcctacaaatacagctctcaggcttcttgtgcctgatgcactggctctctaaagagcacggcatatctgtactcttgtacaagtatctaagtccttgctgtatagcgcagagcctgacagtgcgatgttgttgttatgggttttcatgaagttagcagcacagataccatgcatcatggtttcagaacagctgtgttagcatcctacatggaggaaaagcccatcagttctttgtcaaagggcacctgaaatgggggtaacaactgttagctggacagttaatgtattcacatttactgggactgctgcagaatttctatgttaggggactagccaaggaggaaaagaataaatgtgtaatctgtgtttgttttcgtctccaaatcaagttggcattttaagagaggtgataaagattataatacttttgtaattttcacataaaaaccattatgatcctgttctttacttaaaccaaaaacatagtaagagtatgattggttattctgatctcttattgggcttagttaacagaaataatccactctcattgagaaaaaggtaaaaaaaaaaaatgggtttaattaaatctcactacaaataatacagcctcagtagggtgtacatacttataatcccaggtcttgggagtcagaggcaggggcatcaccacaagtctgagtcaagcctgatctatatagccaattctagacttacctgagctaaataaggaaaactgtgccaacaaataacaacaaaatctgtaatacccatttttctttgttattacggttattaaatgccctaatgtctattaactccagtgtacggccaatgcatatactccattctctgccaaagcttaatttctgaccttccttcttccatatttacctgtccatcacaattctaatccactcatctttcttttccaccagcctgtatatccatgaggacagaatcaggttgaggctgattctgaagctctctgatttgttcactggcatgtagtggggcacaagagctcctgggtgactgcatgaacagcctctggatactaaaatttttgtttaaactgatggctgaccctctcggtcataccctgggtaatgcctgattattgttttcactgagttttggggcagtaatcaaaggtatagaatgaactcatgccgtcagcatgctgctgactgaaccagttacctaagaattctcttaagcggtattgtggtgttattgccaagtttttacacttcatagcacacatcgttaaaagatcctactgagatgtgagtcaatctgaggttcttttctctttcttacaatgcacagggggaacaaaacaaaaactagtagagaactgctattcacatcatgtggtctagactgaaacagaaacctagaggaagaacccatattaaggggcagtatgatcaaagtttatcttttttcccttttttaaaaaatttaaattagaaacaatataattttatacatcaatcccagttacctctccctctcattctcccatgacccccaccaccccacatcccatcccttttctgctccatggtaacaggtgaggccatctatggggaatcatcaaagtctgtcgcatcatttggggcagagcctaggccctccatcacgtgtctagactgagagagtatccctctatggggaatgggctaccaatgtccattcatgcactaggtataaatgctgttctattaccaggggcccaacagatggcccaggccttctaactaacaccaacatgcagggaacctggttccttcctatgctggtttccaagctgttagtctgaggtccatgagctcccatttcttcaggtcagctgtttttgtgggtttccgcaacatggtcttgactcctctgctcatcactcctccctctctaaaaggattccaggaattcagctcagtacttagctgtgggtgtctgcttctatttccatcagctactggatgaaggttctataatggcatataaggtggccatcaatctcattacagtggaagggcatttaagatagcctctcccctactgcttagattcgtagtgggggtcatcccagtatatctctggacatttccctagtgccagatttctctttaagcctataatggctccctttattaaggtatctcttttcttgctctcctctattcttccgacgactcaatcgtccttcatgtcttcctccccgcctactcttatccccttctctttctccggacaccttctccctaccctccccccatgctcccaatttgctaaggagatcttgacccttttaccttctctgggggaccatgtatgtcttagagtcctccttgtgtcctagctactctggaggtgtagattataggctgctaatcctttgctctatgtctaatatccatataggagtgagtacataccatgtttgtctttgtgtgactgggatacctcactcgtgatggtgtcttctaattccatccatttgcctgcgaatttcaagattccattgttttttcccccgattaatactgcattgtgtaaatgtaccacattttctctatccattcttcagttgaggggcatctaaattgcttccatgttctggttattacaaataatgctgctatgaacataactgaacagatgtccttgttgtatgaaatgtgcatcctttgagaatgcacctaagagtggaattgctggatcttgaggtaatctgattcccaatttcctaaggaaccaccatactgatttccaaagtggctgaacaagtttgcactcccaccagcagtggaggagtgttcccctttctcaacatcctctccaacataaactgtcattggtgtttttgattttagccattctgacaggtgtgaggtggtatctcacagttgttttgatttgcatttccctgatggctaaggatgttgagcactttcttaagtgtgtttcagccattttggattcctctattgagaattgtctatttagttcagtactcaactttttaactggatttgtttggtgttatggtgactagcttcttgagttctttgtgtaatttggaaatcagccctttgtcagatgtggggttggtgaacatctgctgttttatcttgctatgtcctttgccttacagaagcttctcagtttcaggaagtcccatttattgtcgatatcagtgtctgtgccactggtgttttgctcaggaagctgtctccggtaccaattccttccagggtacctcccactttctcttctaagaggttaagtgtggctggttttatgttgaggtctttgatccatttggactaaagttttgtgcatagtgatagatatggggctatctgtagtcttctacacatcagcattcagttatgcaagcaccatttgttgcccatgcttttttccattgtataattttagcttctttgtcaaaaatcaggtgtctgtaggtgtgtgggttaatatcagggttttcgactcgattccattggtctacctgtatgtttttgtgccaataccaagctgttattactatagctctataagtagagcttgaagtcagggatggtgatgcctccagaagttcctttattttacagggttgttttggctatcctgggtcttttgtttctccatatagagtattgttctgtcaaggtctgtgaaaaattgtgccggtattttgatggggattgcattcaatctgtagattgcttttggtaagactgcaatttttactatgctgatcctatctatccaagagcatgggagatctttcgattcttctttaatttctttctttaaagactcaaagttcttgctataccgtctttcccgtgtttggttagtgttacctcaagatattttatgttgtttgtggctactgtaaagggtgatgtttctctgacttctttctcagcccatttattgtctgtatgtagtagactactaatttttttgagttaatcttgtatcctaccattttgctcaagatgtttaccaactgtaggagttccctggcagagtttttcgggtcactaatgtaaactatcatatcatctgcaaatagtgaaagtttgacttcttcctttccaatttgtatccccttgatctccttttgttgtcttattgctctagttagaacttcaagtacaatattgaagagatatggaaaaagtagacagtcttgtcttgttcctgattttaggggaatcgcattgagattctctccatttagcttgatgttggctgttggattgcggtgtattgattttattaaatttaagtgtgttgctattatcactgatctctccaagacctttatcatgaaggggtattagattttatcaaaggctttttcagcatctaatgagatgatcatgtggtttttcttttgcactttgtttatatggtagactacatttttatgttcctggcatccctgggatgaagcctacttgatcatggtggatgatttttctaatgtgttcttggattcgatttgccagtattttattgagtacttttgcatcagtgttcatgacagagactggtctatagttttctttctcagttgtatctttgtgtagcttgggtaccaatgtaattttagcctcgtaacaagtttgtcaatgacccttctgcttctattgtgtggaacacttttgaggagtactggtattagctgttctttgcatttctggtagaattctgtactgaaaccatctggcccttggctttgtttggtagagagacttttgatgactacctctatttaaattacttatctgttcttgacttaattttgatatgtgatatacatccagaaaaatgtccatttcctttaaattttcaaattttgtggagtaaaggttttcaaaatatgacctgaagattctctggatttcctcagtgtccattattatggcccccttttcatttctggttttgttaatgtgcatgttctctttttgccttttggttagtttggataaaggtttctctatcttattgattttctcaaagaaccaattcttttgttacagtgattctttgtattctttgtttttactttattaatgctgtgtcttaattctcattggattctaggaagtctttaatttctgtttttatttcttccttgacccaggaatggtgtaattgtgcattgttcaatttccctgtgtttgtatggtttctgcaattgtgttgctgttgaattctaactttaaaccatggtgatccaataagatacaatggggttattccaattttttcgtatctgttgaggtttgctatgttgctgaggatgtgttgattttagagaaggttccatgtggcactgagaaggtatattcttttgtgtttggatggaatgttctatagatatctgttaaacccaagtgggtcatagcttctgttagttcctttttttctttgttagtttctgtctgatggtcctgtctagcggtgagagtgggatgttgaaatctcgaactataagtatgtgaggttttatgtgtgatttgagttttagtaatatttcttttacgaacatggatgcctttgtattgggggcatagatgttcagaattaagagttcattgtgatggatttttctcatgatgaatataaagtgacattcatcttgtttcactgattttagtttgaagtctaatttgttagatattagggttgctataccagcttgtttcttgggtccactagattggaaaatctttttccaacccttaactctgaggtaacatctgtctttgaagttgaggtgtgtttcttatatgcaggcagaaggatggattctgtctccgtatccattctgttagcttgtgtcattttatggcgagttaagaacattaatattgagagataataatgaccaatgatttttaattcttgcttgttttggatttggtggtggtggtggtattgtgtgtggatttccaccccttttttcttttggctgttggtaaagtaggattatctattgcctatgtttttgtgagtgtagctaactccttgggttagaattttccttccagaactttgagtagggatggattagtatggatacgtattgtttaaatctggtttttgtcatggaatatcttgttttctccatctatagtgactgaaagctttgctgggtatagtagtctgggctggcatccgtggcctcttagtgttggtagagtatttatccaggaccttctggctttggagtttccatggagaagtcaggtacaattctgataggtttgcctttctttgttacatggcctttttcctttgctgctcttaatattctttctttattccgtatgtttggggttttgattattatatgacatgggaactctttttttgtagtccactctatttggttgttctgtaagcttcttgtactttcattggtatgttttctttgggttgggaaagttttcttctatgattttgttgaatatgttttctgcacctttgagttgggtttctttaccttcttctatacctattattcttaggtatggccttttcatggtgtcacgtatttcctggatattttgtgttagggatttcttggacttaagattttctttggttgatgagtctatttctcctagtgtatcttcaacgcctgagattctctcttccatctcttgtattctgtttactttgcttgcatatgtagttcctgatcatttacccagcttttctattcccagcattccctcagactgtgctttttattgtctctatttactgtcaagtctgtttgaagtgtttccgtcacttgtttttcttcttggctttcattgttttctttaagagatttgtttattgaaatttttggtttgtcttttcctccatttcttaatttttttttttttgtttttcttccatttctttaagggattttctcattccctctttgaaggtctctaccatcttcataaagttgtttttagggtcgttctcttctgcttcatctgtgtggggatgttcaggtcttgctggtgtggagtccctagactctggtggcatcttattgatctttctgctgttgaatgtgttcttgtactgtagtcttcccattccttcttccaatatgtgccaatggggggtttctccctctcctggtggatacaggctcaaggttctcttctggtggatgcaagcaggtccaacactccaatggctctctgctcccatggatggaagtgggactagcactgcgacatcggcagactctggaaggcctggtccatcagaacgagttcccccatgtgtagtctccaggcctcaggaggctcccatggtcaaagtttggacccagcaaataatacttctaaggaacttatttaatgtatgtaaaggctgtactctcaagtgaggacaaaaggttttcaagcatgtcactgaagcactcatcatactgttaacacaccagaagtcatccatatgccaacaggctgggccgcctagacaagctgccagaccatggtgaggcccacagagataggggatgcagccagatggcatgacaaggtgttccacactgatgttcatgaaaatgatgtgctgagacccaacttggggtgagacagagacacagacagaaccagtgtggtacttcacgctgtgatgagcccatcagtgggtgacacttgatggaaattttccttcctttatgcttgtctgtattttaaaattactttgataacacaagaagcacaatgtttaaagtgtctttgcatatgagatgccaggaatatgatacagagtgaaattacccaaggccttaattcatgaacaatttccacaccagtaagtctactatagctctttgtatgtgcatgcatcagatgtgtgcttcatacctgagaaaaaaacaaatgaaccaatgagttcatgaattaggaaggcaaacattcagaggctaatgttctaatgctaatgttcaggttatacaaacccaagaaactattttacaagagaacaggaatgattagtaaaataaattactttttattaagtgtcttttttaaaatagccagaatataaggaggggcatgtcttttccatcagaattctgttagataaaatacaattactatccccacctatcttttactataaatcatgtattctttatcctactgtccccacaattactccccagctagccaagcctctgtaaccggtacaggaacatcatcagaggtctcaggataatttcagccgtaatcaaagatgttagcacctcacttactgggcattctcactgtctggaacacagaaacaaaggactgggcagagtgcgtttcaagataggcaataaaaaagtggttgcctctcaggttgaaaaaaagaagcttttatagtcaaggcttagtgtgtatgtactttttatgaggggtggatcttggggtatcttgtcgtggctgtcctcaaactccttgagctcaagtgattctcctgccttctaagtagctggaactaccacactactggttatgatctagactttacattaatattcctgcttctgcactgagcccctgaacaacttgcggactaggaaaagaacagtttactaaaacactacatttccttcctccactaacttttatcccaacttgttcagtttctgttctccgcttgccctcctccaaaattattacattaagccaggcaatggcagcacacacctttaatcccagcacttcagaggcagaggaaggtgggtctgtcagttcaaggccagtctggtctacagaatgagttctatgatagcaaaggctacacagagaaaccctgtttccaaaataaataaataaataaaattacatcaaagtagctaccaaagtaattagtaaaataaattaatatgctgtggttcagagcagtgagttaagatgttcaaagtagaatctgaatagtacctgagtgataatctgaaaatttcaaacttgtctgatactgccttagattgtctagttccctgtgatgtcaaaggttcttagattctccttaacattttggtgctgaaatggctctaagtgaaaagatctctttggtctagcaatgtgctcttgagaagatgtggactgcagtctacaaacacctttgaatgagtggcttgctctaggtgagctgccaatgcagtcagggagtcaaagagcatcattagatggcatccttattgcttcagaaatactctctaggtgaaagtggaagaataaaaacattccctctgctaagctgtatagctgactcctctagcacttgtttctggcaagtcctgtggggtgtgaagcctttttcacatccaatctgccttagagctagctgcctgtggactgctctgtatcagctacctctcctcagtctgctggccattttgcccaacttctctattctattctattttacaggaaggggaaagacaaatgactaggaagctctgaggaggggggtttacctcagatggggaacagaatgagagaaaataatgaatgctgtccttgtggaaataagaatttaagaatatggtttcttccttcctggatgcaaagaacagagctgcctgcagaatgtgttccccctgtcacctccccaaactgaggctgcaactctagcatggaactgcagccatcaaggaaggatgctctatggaatcacatcctttcccaaggaggaagagctgttgttgagattctgatctctacccactcaccccagtcatgatttctgccaatgtctcctgaacatcctcatttgctaggaaaataccactacctcaatagcactggaagttaaagaactggccagagctgggtagtggtagagcacacttttactcccagcattcgggagacagaggcaagtggacctctgagtttgaggccagcctggtctccagagtgagttccaggacacctagggctacacagagaaaccctgtgggggagaaggggggagaggggaagaaagggaaggggagaggggaagggaggggaggagagagagagagagagagagagagagagagagagagagagagagagagagagagagagagagacagaaatccctagcagaagccctggttcagaaagattgcttttgaagaggaagtttgttctgttgtttgtaaatggtgctgaagtttagttcttgtaggatgatgagtatgaagatctctcaaaattaaagccaaaaatacccactgcctcctatctctgggttctagtttttttagggcaaaagattaacagttgatttgttctctgtgctgcttagagaaaaagaaagaaagaaaagaaaaacaaaaacaaaatcaaaccacaaaaccacaccagctctttccaggaagaaagttttctaaattcaagcaattcagtgaactgttctacccaagtgtcttgcacttggctcctcaaaaggctttgcactctgacaccacaccaaagcagagcaggttcaaaaggaggggcaggtagacaactggggcatttgttataagaacaagatgctgcattcactagtaaaagatgtggcttttatctaccaaggtcttgtcctacacctagccatacgactgggggagagagttcctattccttaggacagagctctccaactggagcctgcatccaatcacttcctgaaggacatgtggactccagagccactctccagtgtactccaataggtctggtggatatataaaatctgtaatgaactcctaagggttgctcagctagtccaggaaagacaatttgaaaaccagagcttcattgcaatttcaaaacactggacccatctaatttagccacataccatcaaagtggaactggcaggagacacactaaagggcctattcctcatctgatggaaaaaaacatctggcaacaactttcattactgtccatccttgatatcttgcatgtaacttctgatccagaagcacagctgtagaccagaatcacaacagctgtaggaaagactgtcccactcacacccaccccactccttctatttccacaactaagctttcagatgccaccatctcagcagcaaacagaatgaaagctttaaaacaggaagatattgattaaaatatctctccgacattcaccagtgctgcttcctgggcaaatttattgaccttcaaatcttgacttctttatctacaaaactgatagagtaatacttcataataagactttttgtgcataaaatacctggcttgctacttagcatatgacatgactctaataaagatgctggccatgggactttccctatttcttggaggcaggactgactgaagcgggttacagagcaaatggggaaactctttgccccaacaatacgggtaggtatagaatcacaacttgctaactagaaagttaaatctcaagctggatggaggatgacacttccgtcctgttatacctaacatcttatatttgtcttatggtgctaccagagtacaaatccttcagggtgaggaggaaagaagctgtaagtctgatggtaaaaataaattcaataaatgctggcattcaaagaacataaaaatcttaccctttaaagtttagttttgatggaatgtggtagtctatcaaggtgctctaaataatattttcaacatttaaaaagaatggcaataccattttattatttgtaaaataaagctgaagagggatcaaaaatactttttacttaactttattaaaagttgaaaatttttactgatgactatgcttttcagaaaaagcaaaaaacatctgactggctaatctacactctggccacttccctcagaaagcagaagcatgaatcactacccagaggttcttaaattctttttttaaaatggattctagtagctgaaaacaaagaggtctcgtgaacaagaaaaactgattagtaaatcattcacaatcctatcatctgataattataacctgaatgttgtcatctacaaaaaaagcttaaagcctgacttaacctagggataaaacttaggggaccagatattttcaaaacacacatcatggtgatgcagaagccttccacagacttcatgtgtggtgatgctcatcggttctgatggctcattggagaggtatttaaatatgactgttttggtgaagcctgaactttaacttctaatataataagtgccagtagacatgctccaaatgaactaacagtggaagtcaactatttttaagtattccaagagatgctaagattaaaagtcaccccaaaatttagattcttctaacttttgcacagatttcagaggatattctgggtagcatctggaactcagccttgaaaaattagtattttcagagaaacattcaatttaaaatgtatagcatgaatagctcaactactaagtgacggggggggggggtgaaatcaagaaagaaagtggttaactgcaaaagtgaaaacattcaaaagtgtattccatgtcaccccttcatcccccaatacaaaatgaatctctgtaattagaacaaacaaaaaaataattatttgaaattatcccatgttggggctggagagatgtctcagaagttaagagcattgactgctcttccagaggtcctgagttcaattcccagcaaccacatggtggctcacaaccatccgttatgagatctggtgccctcttcttgtgtgcagatataatggaagcagaatgttgtatacataataaataaaatctttaaaaaaaaaaagaaattatcccatgtttggggccttgactagcttgaaaaaaaaatataaggagtattctaaatttagaaaaagtattgttcagtctattctgcacacagacacatgctgaaatgaatgtgagctctgggaaagaagtatatgcttgggtttgcaagaaggatgagaagataatggttcctttcctgtaaggcccagcagcagagcaagcatctactgagaaagaatcatccaggtaggacttgcaagagtctaatgcagtaactgatggtattctcttgaagagtgaaaaatgaatgaagattggaagagaatccagtttcagtgtgaagtcaaaaaacacactagaaagtgaggacaattctacatcctccaaatctggagccctgtgtacttctacatttcttatgcttctttccctttgaaggaccatatatgaacatttaaacacaactaaaatctaattacttcttattttccttacttaagacatacttactgaattaaatcctttaaaagactcctcagatcctgtctgcgaaaggaaggacactttcagttctgatttcctgctagcagcttgcctttgggacatgtaaatgggacatcctggggtactctaggaggaccatagtcccatgctgacagtgctgatcctttctgagtggtgctgctgttaagcccttggtaacagactgaatgaaatgcatggtgttttctctgctctttattaccaaagtctctaatgactccaccatagcttgtctctctctgtcaatggaggttactgcttaactctaagaccagtgtgctaccacctctctgtccattaactgttccaaacttgttaccacaggctaaaaacattaataaagtgtcatttcatctcatttaaagattctgccttgatcactgaaataatttcctagttacagaaaaatgcttctttctctcaaagtcaatttatactaattttacatacagaaattcttaatacacaatatcatacacattaaaccaaaacaaggaaatctgcctaactggttattcattttccctatttacatgcataacacataaaaactagtcctgcagacaagtgtttgtttataggtattctactttactgtagttttcaattaaattttgcatctaaaatacaaaagcatttatatcaattgcaatgtatcgtatttttgctaaaacaatggttgttcttgttcccaatgcaagtgcccacttatgtgcatctttgcatgggttatttgattaagcacaatgctttactcacacaattctccatactgttcttgtctaatttctaagaaaagaagttcttaattgaagccacttattgatttgcctaaatccccagaattagtaagctgtgcctagaaaatcctttaaccaaccctgtccaaaatgagtgtatttaattatgaaaccagggaaggaaaaaaaaattagagttggaattaagcattaaaatacactgaaacctaataaaaactgcccaagaagagagaataagaatatacatttggtgtttaagggctgtgtcttcctgcaggaatcctgtccagagatctggtgagatgagaaaagaatgctttcacagatggattagaagctgcttcaatgtgatgagttgaagaacaagagtaaggacaataaggactattccaaaagggaggaggaacacaggcaacttataagagtaatgaaggccagaagaaaagtacaaaacgatcaaacacaaagacagacagacagacagacagacagacagacagacagacagacagacagacacacacacacacacacacacacacacacacgaagtctcatcaagaagtattttaattttatgatttaagttggaggaagaagaaccaccactgccattgtcaggtgtggtggcacaggcctagatctcagcatttgggaagcacaggcagagggaatcactcagcattcaggccagcctggtttaaccaacaattttcaagacagttgaaactatacagtaaggtcctattaatagatggtaggtaggtagacagagatagaagatagatgatagatggatagatcgatacatcaatagatagataatgatgtaagttatattaaaataaaagcttgttttagtcacttttgtatatttttcttttggctacaatattatgttctttttaagaaaagaaagcttttaagtttttatttttcataccattctttcatttatctaatcctgcttataccttttttttcattatagagaaatattttctctctttttttaaaaaaatatctactcaatataaaaaccatctctactcttcatttcattaacattcattttggctcagcaaggaaactgacatttgaaacaacagaagcccaacaacaggaaaaactaaagagaaatgttgggaattttaaactcaataatgaaaaccacagtggaaagtatcaccagtagacttaaccaaacagaagaaagaacatcagtggtggaagatgaggtcaagtagacactacattcaagcatcaataaaaataaacaaataaataaatgaatgaatggatggattaataaataaacaaaacaaatattcaagaactctgggaaatggtcaaaaaatgaaacccaagaatcatctgagattaaaacacccgaactatgccgggcattggtggtgcatgcctttaatcccagcacttgggaggcagaggcaagcggatctctgagttcgaggctagcctggtctccagagcaagtgccaagataggctccaaaggtacacagagaaattctgtctcgaaaaaaaacaaaaaacaaaatacaaaaacaaacaaaaaacacccaaactaaatttgttcaataatattacagcagaaaacttgtgaaatctaggaagaaattgacatttaagcataggaggcaatttggattcaaaagctatgcacagaaaagaaataccatttccacaatgcctaatactaaagatgtcaaaagtacaaaacaaagaaaaaatattaaggtgtaagagaaaaagcaccagctcacatacaaaagtgatagcaaataacaagaaaccacataacagaaaccctcaaaaaaacaaagcaaagaaagatctattgccctctctgaaaactaccaaccaatactgctctgtccagaaaagtgactgttgaaaattgatgaacacattcaaagacaagcacagactaaagcaaattatacattcagccagcagcactgcagaaaatatgtaaatcctagccacagaggatacagaaagaaagattaagatatcacacacacacacacacacacacacacacacacacacacacacacacacacacacacgaacaagggagagctaggaaggatgtactgtgtccaacaaagtaaaacagtaaacagctaacaagattagggaaggaaaaaaataaaacaaaaaggaaaaccaagggctggagagatagctcattggttaagagcactgaattctcttccagaagaccagggttcaattcccagcacccacatggcagctcacatctatctattaactctagttccaggacttctgacaccctcacacagacatacatgcaggcaaaacaccaatgaatgtaaaattttttttaaaaaaggaaaagcaatagtctaactgccataaaaacaaccaaaacaactacaggaattagcaaaggtctccttcccataattgttaatgttctaactaaaagatacagatttggtggttctaatcaaaacaaaacttaaactatcagtggtctccataaaaaaaaaaaacctatctcaatggtaaaaatactcatactaataatgaaagcctagaagtctaacaagcagaaaaagctgaaaataagccagtatatttggtcttgtggtcctgggctttcagataaatgatacagcagacttcagatcaaaattagccaagagtagtaattatagaaagccaatgcaaaattcctagaatcaaatgaaaatgatagtacagtttatcagaaccattgaaacaggaaaaaacatttctctgaggaaagagcatagctatgaatgcttaccaaaaaaaaactcagattttaaataatgaggtagttcaaggtctaagaaaaacaaaaacaaaccccaaatcagtagacagataaaaataattaaaaaccagcacaataacagatgaaataaagacttgaactgatcataaagaaatcaacaaaatgaactgatttctttatgaaataatcaatatcaataaaccctaaaccaaactagaagactcaggtgaatataattagagataaaagacatttcaatagatattgatgtaactattcatagggtcaacagagaacttacattacaaaaagctagaaaggttagaagaaatggatcaaatcctgccggcacagaacataccaaagcttaatcaagaggatatgtacaatgcacaatgaggttgtagcagtagcaaacagtcttaaaacaaagaaaagaccaggaccaaccagattcctggagaatctatctacaagaactttaaagaaaagctactacaaatgcttctcaaactgttccacaaaagagaaatgcaaccaaactcatcttatggcatcaatattaattaccatgtaccaaaaccagataaggacacaatatactacagacacaagtcaataaatgtaattcagtatctaaacagacaacagaaatcacctgatcattttaagaaaagaaaaaaaggcctttgacaaagtttaacattccttcatgataaaagtgctaaacaaactaggactaaaaggggcatatgaacacaaggttacattcaacaaatagccaacattatactaaataataaatgtgaaaagaatgaaagcattaattacctctagaaaacaggacaagcgtgtctactgcctctactcttagtcaaatatagtgtttaaagtcctagctagagcaataaggcataagaaagatttaaaagatacaaataggaaagaagtcaaactatcagccattaagagcacttgctgttcttaaagcctccaaaatggaggctcacaactatccatagctccagttctagaggagctgataccttccttttggctttcataggcactagacatgcatgtggtgcacatatgtacatgtaggcaaacacatgcataaaagaaaaaaatgtattttttctaaagtcccaataataccactagaaaattcttaaaattgatgaacactttcagcaactaagaggatgaaaagtcaatggccttcctaaataccaataagaaacttgtcaagaaaaaaacaaaaaggaataaaaatccattctcaatagtttgaaaaagtaacaaaatacctaggaatctaccttaccaagaatattaaagattccaaaaatgaaaattttaagataaaagaaagttgtagaagacacaagatgatggagcatgctcatggattggaagaatctatattgttgaaatggctattttacttaagtgaagtgcagtcaacataatctctaccaaaattccaacgatagtcttcaaataacgagaaaaaaatctgaaaattcacatagaagcacaaaagatcccctcaaaccaaagcaatccttacagaggagcacaactgagggcataaaaggacctgatctcaacagactacagagctacaggacacaaagagcatactattgaaaaccaacagacccacagatcaatggaataaaacaaaggacaaaatcataaacctacacagctaaaacaatagtgcttggcaaactatatatacatagaacacatccctcactctgtataaatcaattcaaaatggatccaatactttagctctccaggttgctagaggaaaagtggaaatgctgcaaaatacaggcataggcaaagactgaaaaaagactctaaaatcacaggaaatcatttcaagagctaacaaatgggaatgaattaaattaaaaggcttctgcaaacctaaagaaactatcagcagagtgaagagacaccctatggtatggaaaaaaagctttgccctttacacatcaatggggattaatatctagaatctataaagaattccaaaattaaaaccaaaacaataaaaccatctaatcaataaatgggtaaatgaattgaacagacttctcaaatgaaaaacagtcagtaaatagttgaaaaaacattcaacatcttagtcatcaaagaaatgcaaattaaagtcacattgagattacatgacacaccagccagaatacctctcataaagtacaggtacagtaaatgctggctaggatgtggagaaacagggcccttactcacttctgatggaagtgtaaactggtccaactactacagaaagtcaatatgtaaggttctcaaaagaatgaacttagatctaccatatggcccagttacatcacttctgggcatattcatgaagatctttaaatcagaacaccagagatacctgcacaccatccatgtttggaattagctggaagcctattaacagataatagaatgtacaaaagggaaatgtagtaagtaaacattgcacacatacaccccagacagcagaaggctgaattatatggtataaaaggaccagcaagaaggtaggagaaggaaaaggcaacagaaggagcaaatgagcaaagtacaaaatacatgtttataagaatgtaataacaagggctgggcagtggtggtgcatgcctttaatcccagcactcgggaggcaaagacaggcagatctctctgagttcaagatcagcctggtctacaagagctagttccagaacaggctccaaagctacatagagaagctgtctcaaaaaaaacaaaaacaaaataaaaatgtaataataaatccattattttatatgctaagaactataaagaaaatgagctcataaaaaacaagatagaatgcttttaattctatagctttttttacattgtccttgtttcagattttaactttctaattcattaatacataatatccagagataaaaatgcagatttaagtcagaatatcaacaataatcagcagctttagttttctctattttggtcattttgctgcaagcattttgctatttattcttctcacacatattctcatgcagttatccttaggactctagctctgtctatccccttgtacattttgtagcagcagtccttaagttttctctgtgggtttagtttccctatatattcattggattctttcccacccagtacaggttggggagggaggcagagaagactgggaaatgattattctaatataattttacagtgtcacaattcattcccttgggagaaaactcattgtttattttgcaaacttccatgatacagtgctattgctcaccctggtgtgaatacaaacgtattttatgaaagccccctgtgcgctgccatcaacaccctagcttcatagaacagtctttagatgccagatctgtccaagtacagaaggagacatttccttcctctggacttgcctgacctgactgaggctgaagctgtgacagtactcaaggctctgtaaggcctaatccatagagccaagacatttccaaatgtccttcctttcagcgttcagcacataccctgcccactttgaagcacattttaaactgtataatgagcagacatttctgaacaagagctctgaaatgagtccactgccctgggcaaactccatcagaaataagactccagctacaaatttcatcaacccctgcctgtttttagaggctaagattctgtacccagaaagcccctgttttgctgtcttgtgtggcaaattatcttattgcacatgcaagtcacagtatgtttgaaggcagaaaacattttgtagagtcatttttctccttccccctttatgtagggtctagaaaacgaactcattggcaggcttatacagcaagaacctctctccactgagcctattcactgggctctctatagagtatttatctgtcccattcaaggcctctgtccatacctcagtttcacagacagactttctaattctatggtcagtaactttcttatctgtccttcttcagcacttcaccaggtatctccaccacgcaaaatgcaatggaaacacaaaggcccacagctctgcctaggtacaaatagggaggagaaggaggtaccatctcatagattcagtgctggcttatattacatttatgacagtgttgtctgagtcagtgttaatgtctgtacgtgaagctcagagcaatatgatattctagcttataatagtagacttcagagatgtaaagtcctttgtcagtggaaacatttttttttttttaaacaagagtcatgagcaactgaagagcattactgaatgctaacatgacctaggttacactcagtggcatttactgatatagaaaaaaaaaatcaaatatatgctactcattttttactagtctagtgcttcattcacaggatacagataagactaaatgatcccttttagaatccagctaattagccaggctttgatggtgcatgcctttaatcccagcacttgggaagcagaggcaggaggatctctgtgagttcgaagccagtctggtctacagagcgagttccaggacaggctccaaagcaatacagagaaaccctgtcttgaaaaacaaagcaacaacaacaataacaaaacaaacaacaacaacaaaaaagaaaccagctaaattatacaggggcatggggggagcttttattctgttttgttaaggaactacacttccttaagagtagtaaaattagggagtatgcatgtttggatgttgtatattaagtacagaccattaaaatatcaaagggttttactgttctgtccagtaattatttgaaggtaaaatccccacttttttaataatctacaaggcttagagatctcagtctgctccaggcaggacacagaaaaagtaggtaatgagagtaagagacaatcaagtaggtcctccaagtacctgaagtacaaacgtcacgtgaatatgtaagttctcagctattcaaattcaaggcaagcaggaccaccacagtgttatctgctcccctagcaagggcccaggtctaaaaccttcacttccttctccttccttagggtacagtggtaaactcttagcacccagatgcacaccaagagctgagtcacagtttcctcattttcctgttcttcacaatagtccttcagaggtggcactgaggtctaagtttaggggaatggtagcctagagaaatgacctaaacatggcaaatgaacatcaattccagtccaagcttgtctagtgtctaagctcctaagtccttccataatgtgatgtcattctccacgctaactgtaccacacgaggaagggtgttatacatacacaagataaaactaaagcttaaacaatttaaaagcaaatagcagataaccataacggttcacacctataatcatagcactcaagagaggctgaggcatgaggcttgccatgaattagaggccatcctgcttaaaaaaaaaaaaaacacaagccccaagaaagcacaacccaagtgggaaggggaagtacttctagcaggactcttacagtacaactatggttaaatctaactcctattaagatggggagaattaaattaataatagcacctgctgttcttttgcagatttgttcatttatataacaaaagtaaaaagaatgccatccccacctcagtgtaatgggggatttttgttgtggtttggaatcaaagctaaggctctgcacatgccgtaggattacactgtgtacaaatgagtgaaagctcaaccctaatgagttttgttttttaaataaagtaacatacaactggagggggagcaacaaacactcatcaccctgcacagaagcactcgtaactgttttgcaaatattctttcatttaatcctccctgtcagcaatttattctcatcattcccctttaacaaaatggggacataaagcagaatagaaagtggatttgcagaaactcacggtagtcagtcctggtgactgggaccaccacacaggtaacatactgtttacacagagctgatcatttcaaatgaccacactctagaaggaatgttccttggcctgcaggggatacaggtcctgaaggagtatgataacctcctctcttcttccacaataccaatgacagagctaagaagactgggcagacagcaaagggaggaaagcactcaagtagagcattcctgagtgacaggaggtacactgttcagactttatgcatataaatcatctggggggtttatgaagctaatctaatatccccattttaaaaagcagacatttataatcaaaggcctcagttagaatacttgtaaattacttaaattaaaacccatttctttctaaagaatttggttgctttaaaacattcactatgcaaaaatctcaaacacatcaagtttggagaataatgaaacaaactcctaataaattatggcaatcatgaaactttagacggagtactccaacaggcagcactaatcacactcagtgggttattagccaaaaaaaggaaaggccatgaatggggtggggaatggtgagggcccctgggggaactgggagggggagctggaggtactaacaatgaggatgcactgtttacatgtatgacgttgtgaaagaataaacgagatcttttgtctttcagagacttcaacagactgctctatttgcctccttcagtcttccactctcctatcctatctcttctgactacaatgctacttgtctgccttttgccccatatgctgcaatgtgcgtctctatcatttccaggtactttcctatacaatccacaatgtgaccatcatgtttaacaaaactaagaataatttcttggcattacacctgccctatttttcagcttcactgattatctaaagattatctatttcttttaaaacttggcttttgttcaaatcaagatgcaaacaaaggaggcatatacactcctctcttctgggttttaggctgaaacagtcttctctagctcaccccttctatcacaccatcaagtcaatgaggaaatcagctcaatcaacacacaccgtgttcactcactcttgcccccagttatttattgccataccaccagaaggcagtgggcatgactgataccttccaccctcagaggaagccttttatagtttccttactgttttgtcttcaaagatgtaacatacaatgcatgacagggcagctgtattctgtcttcagaagtcatctatgttaccaagggctaaatccatctgttattacaaggggaagcaactgaagtcttctttgagagactgctaggaacccagccaaaccccttgcaccccatcacagcagaggcacccaagccaaaccttgataattctctccagaacagagctgcccattgttaattatggagtctggggaattaacaggctaacagaccactgtgaggcagggagaaatcagtttactggatcacagactgtattcagctcattttctttgtcggggagttttaattatttatgatgaagctccactgcatgtttgtggtaacgacatcttggcaacatgaacccttgctgcatcagggcatagctcggggaggtcagggaggaaggtgacttgcaagggctatcatgtctgtagataagaatgttaagagttggccatctccaatgtcagaaccacagcagcaagagcctgtgctggacaactgttggtggaacacaatgcctactctaccctcattatacttgctattaggtgctgggcctttgccaagggttgatgaacctagaaatgacccaggcacagcaccctgcggctatgcccctgagattctcattggaaccgcttcctatttacactctagcttgtattgatgagctgaaatactgcacacagaatgcagtgaggcctctgggaacctgagcagccactgcaaaagcctaacatgctgattcactctgtgacattggaggaaccaggacctctgttgccccacacctccggggcctggttatttacccaaacccattattttattagaaactactatcactaataacataaaaatgaacaatttaaaagacatcttctgaaaaagaagagcaatgcaaaagatcctacattcctgccaacctgtattccttgtctcatacactgtgcattgctattatttaatgctaataaaaggcacttacttttcacttggcttgtgggttcctgggggatagggactgtacttcaatcagtccagacctttataaacaggaagcacttactaaacagcatctttagcaaaagcaagtcctggggaacctccttgtccctgtccttccatcctatcaactacctgggtgtgttctacttttcctgatatcagtcaccacactattatataaattaccatgtatttacctagatccctggctagcagcttagcaactcaagagcagctgagttctaggttgcataaatacagtgcctggcacacagacatgccataacggaatggatgaacaggtgagtaaacaggactgagaattaagtttacagcacaaagaagctacatctaacaaacggcatgtcttagtcacagttctactgctatgaagagatactatgaccaaggcagctctgaaagcatttattcgggggcttgcttacagtttcagaggttcacccatcatcaacacagcagggagggtgacaacatgcatggcgctggagaaaatacctgagcgctttacatcctcatctgcaggcaggcagagagagacactggccctcagtatgggctttggaaacctgtaatgatacatctcctacaacaaggccacacctcctcatcctgctcaaacatcctaccaactagggactggacattcaaatataggaggagcctatggggccatcctcattcaaagctctagggacacaaacaagttggttccataactcagaagcaagctaaagtttgctgctgagggtgctataattttacattactaatattacaagtgagcatactgaatttcttttacgtcttaaaaatggattatactaagcataacactacattgttcacacattgtgtaagtatagtacacaagtatatattccaattcactgtttatttcaactgcacagaattcctgagtacctatattatatttgaactgctttcttattgatttggttaatttctaagttttcaatattacaaataatgctcaatcaaactatgtactactagtctttccctctcacccccacctctcagtgtattagagaaagagagagcaacatgagcattatttaaagaaccgcactaccttgcataaccataaaatggaataattaggaagaaaggaccctacggaagccattcatgaatgaatggagatgtgagtggaatatgtgaggcttccaacagaagggctgggcagtggggtggtgtatgcttttaatcccagcacttgggaggcaggcaggtggctctctgctgagtttgaggccagcctgatctacaaagcaaattccaggacagccagagctattatacaaagaaaccctgtcttgaaaaacaacaacaaaagaatactgtgctggatggcacctctgcactttggggagttctgccatatatttactaaatcaatatacaataagcatggagtatgtgcacagagctgcacacagtgctgctggcttgggcaaaaaataaaggatgacaactcattttcacagagtaagatctttagggtagactttctagtgattacagctgtgtactgccatgttgcctacttcagggtccaccatgtcaccaggctggcagactccttgaagccgagcttagttctttactaaatcagactgtgatcctggagtctgtgacgtattcatggttaatggattgttgtggtttaaaatttactctaccctgtgattaaattgtatgtacaaacatcaagatcaaaaatgatctgatggcatatcatgggacagtaaagtatcttactgcattagaactacattgttagaatgaaagttagggtctacctggatttttaattatgcatgttaaacctattttctgttattgaggaaaactaggataaggatatggggtattactaccctggaaaatagctaattagatctacctgtggccggatcctagtagcacagctctgctcagtaattctgcttcctctcagtttcctaccctgtctccaaatcctaatcactgtctcccatgaagttgcccctccattttccgactctcctgataacccttatactcacccatctctttcttggcagaccctgcctactacttcagataagactgatgggggctatcggttgaaggctgccttctctaccttgaaccatttttgctgaggctgagactggctttgaactcagcttctgattctgcggtgttgggattgctggttgacaggtacacgctactatgcaagacttgtacctggtgtcctgcttctccagaacacttttatttttacattttctttgctagtgttaacgagtttacctctttaccagaaaattaccactgactaacaaatgcattttgaacttcaaatgaaaaaattcaaatatgcaaatcaaaataaggctgatggtaatcctgcttctggcttcccctcaagctactgcttctctgccaccctgcctctccttgatatggctcctatccagattgggctcctccttgctgcctcccagtgcaactcccagttccacacagcaccatctgtggtaccctgcaacacctccaggaacacaaagttccaccatctccctctcctgaccaaaggccccctggaaattatgactgaccatagagggtgggatctgaggctttccgttgtttttcataactgcctccataaatctgccccaccttgttggcttctgtctccaaatttttcaacttccagagaactggcctgtctttgctcctctcctctcttcccctccactgccattcagccgttcgaacactccccatcacagggccagtgtgcacaacacacagagcttatcatgtcttgacctccagcaggactgctctggtttcctccaaaccttgcaaatgtatgagaagactgccttccttccactggaacccgactactggcagactcatccctgctgtggctgcttatgaaatcctggcttaaaccatgcactcaattcttcagtttcagtctagttactatccatccactgagactgctaaaataaaacaccaaaaactgggaacacttatagctctggagcctgtgaagtgcaaattcaaaaagctacagattcattgtgtggtgaggacctgctttctggtctgtaaacagcaacttctcaagactatggtctcacatggtgggggaggtgaacgatctccttttcgtctattttactccggcactaataccattcataaggtttcttatcacatttatggtgtaataacctccctaatataatcaccctgggaatcaggacttcaacatatcaatcagggagtggagagaggcacaatcaagactacagtaagtaatgtaggttttctcatttttatttaatagtaaatggggataataacatgtagcttttaatatcaagtgcattaaatttcactgaatggggcaaaagcttaaaaacttccgaacacatttcaacaaaacttaaacgtacagaaagaatagtgacctctggagcagggaggctgctaagcagtagatactctctctagctcactcaggcccttaggcctaggccaccaaaaatccctgaaaagatacttattacttatttattgtaaatacatgtggctgttggtttgtgtgggtgcatgtgtatgtagaggccaggtcagtcacagatgctgtttctctggagccatccatcttatttttgagtatctccttttttggcatgaagtttgccaagcagactaagcatataacaagtgagctccagagatccatccactgtcttcatcttccaatcactgtgattaaaaacaacactacacctggtctcaggtttatttcttttcttttttcctttttcttttttgatttattatgatatatagtgttctgcctgcatgtatgcctgcaagccagaagagggtaccagatctcattacagataccaccatgtggttgctgggaactgaactaaggacctctggaaaagcagctagtgctcttaacacctgagccagctctccagctcctagcctcaggttctttaagtgggttctgggggactgaactctggtcctcatcctgcagagcaaggacataactacctgagctacttctttagtcttgaaaagtctatcttctagggtgttggttgttttatacttgccattatcataattcatttccaaatatactacaagtgaaaaaatattgcttcttcattcttggcatgcatgtctaacgttcaacaagtgtaaatgctgtaaatattaacaccaatattctctttacagtaattgtaaccttactgatggcttatgtgatgacaactttgctgtacagaattggcagcaattccttaataggccctgacattaaaaagatgagatactttttctgacatgacatatcaagtaaaatgtttgttttcaataggaaagcacaaatgctaaaatagtgactgaaatggatttaataaataaccatccacaaaaatgttaccaatgataagttctgaacacagattcagaagatggtttacaaaacgtaaaatgaatatgcactgattgggggagggagggtgaacctgagtgcagactgaaaactttcacccaggcttgtccctgttggctgtagagggtataagaatgcttcccaaatagccagcccacttcccttaaccatggtccaggttagcttggttaacctacttcacagccttctttcactccactactacaaccacatgctttaactttgcactgtggtccacatctcccataaggagaaaattcagcaatgaccagtctccgagcagatatcaggatctgtacacagaaatgtggtctgcagaatctcagttgatcagaacaagagctggaaggtagcatgagttatcaagttcacaggtctcagagacacatatcaactctgagtggcaggtcagggaattcacagatgagaagcagactagacaaaaagacaaagattgaagagctccagagtgcaactccatgtaacacaaccccagaactcaggctgcaaacagctcaagtggcctggaaagccagtgaaatcctgtgccctagaacaagcagcctgcaaagcagaccccacagacactgcacaccacccgccacctgagtatcatttcatcatgcacagcctgtgtcctccttacaaaatacagagggcagtagcaggaagcaatgagcaatgaaatggatgcttacaggaagctcctagcagagacaagcaaccccataaagtgagactttgaggtgatagctaccttcccttcccctaggcctaaagtggcaggttctccatacctgatttacaggtaagcaagtggcacatgcccaaagaggctcaagattaacagggtgcaaagcaaagtaacttcttacaacagcttttcttgtccaacttaatcattaaagcctaagtgaatgtgctttatgttacttaaaagagggagggagatactgtctaaaagtaaactgtcctcatacagtttccatgttctgtggtatctaggaggtcactgagaaacctgcctctgcttcctcacgcctatgatccatgttataccaaggtggatgggaaaagttaaaaccaaacacagaatcctgctaaaaatcaaatggaaagcaaacatgatgcccttaacaaagatacaagagagattactttttgactttcgataacactttggataaataaggttccagcaagtcaggtcagactttctgatcaaagatcaagttgcagcctgttctctactaggggaagacattactagaacattttagggagattagatacttgactggcaagactgaaataccttggccttcagtttagaaaacaggcaactaaggacctgggcagtggaagtgatgaaagttcacacttgttaatgttttaacaaaactcacaatcagtaacgctcagggttatgatgagcaaatctttatggatgctccaaggtaaactgcagaatgatgcagctgtttgttctcctatggtcaggtgtatatctgccataaagttgacagtatcttcctcatagtggggctctaagtgatttttactttcttcttgtttttctgtgttgtcagaactttctttttgtaatgagaaacttgctgtgaaatttataaaaactattgtttttccattttggagaaaagaaaaacatctagaccagataaaaataaatgggtttctaaatttcatatagttaagtgtatatcttgtaactcatacctaaggagtttttctgccatgtaagcttttcaattgactgctggtttgtgactaagttattcagagtgtgtcatttatggtttacatcaagcccagcagcaagtgacccaagactgcaactggagctccaatgcgttccctagatcctcaccagatctgtttgtgagaaattgtcagaataaatacaggacatccaacatttccgggtcaaacactccatttaccaatgcagaatggcaggaaggagacacagaaagagaacttacatagtgtaaaaaatacatatactcccatgcagagaaaactctgcctggttgtggagaattaactgatttcattgcacggttgcctccacagatgaacaaaaggaatgtaggtgaagtcagatgagtggtggcacagcaaccacagcatcacatgaccagttccctctgactacatcgtgtttcattcatcttatgacatctgctgaacccaactgtgagtcagatgctgtaaaccctccacctgcaaggcagttcagtagtcgcaggatctaactggtggaagaccactgtgggggttgctgccgaaggcatttgagctgcattttatgcattataaaattcaattccagtagtcaaatcatactttataacttacacattcagtgacttgggacataagttttggacatttttcatgtgcaaaattagattactatctacctggcacttttgagtgcatcaagggaaaggcctggagctggactgggtccagaagtgcttggaaggctgtctcacttcctcccctctttctgattgctttagctgaccttccttacttgtaaacaccctgaagtcaggatgacaagctacactgactgactaccagggaatgtccgtgtacttgatttcagcagcatctacatccactggccctttagggctctttcatctataagctacaagcttgggtcacctcatcactacaaggtagaagtggacattctgggctcagcctggggaggacagagtcctggatgctatagatcttgatgaacagctcctgctgttttcctgagatgaggcttttgttcccagtgttccagcctgctgtctacagcttttccacctctgtagctgatctgacccagctccttcacctacactacaagtcaagctttgacaattctctcttcaacctagagcacagccccacagtttcaatggtcaaagcttccatgactgaaccttctgtgataaagtccagtctgacacgatggcaacaatacaacaggatgtggaaggccaccagtaggggccctgtaaccccctgttgatggtgctgttaccaaggtttcctgaatgtgctgctcaaccagatttcccttataggcaacaattgtgtggcacccaaagatgcccaggtaggttcaatatagctcatctgaggcacagctaatgtcaacagaaactgccccaccccccgatgttcttgcctgcctcctacatcatcgtcaacatcatcacagtccgagaatctatcattcatttatcagatacatggttcacaaacttcaactttaatgcatagcggttacccaaattataggtgcattaacagtttctgaggttgtagccaacaatgtagcatgtcttccacctatcaaaaagaataaagggaatacacatcctcacattccaaataaggaggtggctggggaaacactgtcaatctcatccagcaatacacatcctgggcaaacagcaggaaaatggcctttaaaaagcaaatggaggagattccactggcctgctgtatctggcactggctctggtaatcatagggtggaggaggggctcttagcaccatgtgcttcaagtccatattctactccacagcaatatgaccgtagtgtgaaaccttgatatgtcattttggtgatggtcagcaaaatgctgctgtcacttagtgcttttcaagtatcctgactataggcagggacattgctgcaaggccaggatccagtctgtcctcagagcatggatggttctgtagcctgatatagctttctatggctttggaggtaaatctgacatgaatgaatggtctgggactttgttccatagagagaatagaaataatggttgcccccaaacactgcaaattttcccggctttccctgactatgttatctgggtgtagacagtttctgcaatgactgagccccccagaaccaaaaacagctaggagactgaccatgaagattaatttcagtttctcagaactttctgattgttctcttcctcatctcccattcagcatgccgaggcattatcgtcttgaccttacctcaccttactttagatatttcaataccattcctgttttttttttaaaaattagtctggtaggtttctgatgatgagcagatgggaaacagtatataggagctgaatggctaaacgaaagatcatccctcttaatgggcagcatgttcagctatttcatagactgtataatggtattcttataattcattgttacatagggaattataattgccgctattatgttagtaaagaaactgaaattcaaagatgactttgtagtcagtgtccagtgaagtcgtatttgactccactaactattcttaaatagtatgccacgcagtagtgcatcaaaacttaccatggcaaacaaagttcattcattcattcattcactcattcattcactcatccatacatccattcatctagcatagtcaaattctgtgctaaatgttgtacttggttttatttaaagcttattctctatccttgggtgttaaagatcttaaggtcatgccgatttttaaatttttgtttcagatgtatttattttgtgggttagtgttttgcctgcatgcatatatgtgtgtctactgcctgttggagtcacaagagaatagcagatcctctagtccggaattaaggatagttataaaccacaatgtgggtgctgggaacccaggtcctctataagagctataagtccacttaaccactgagcccctgctcatactattttaagcaaaatgaattagctcaagttgacctgagatatggatgtagacaatgtggatacactgagaaaagccacaatgcagataggtcccaattaaaatgctgagggaacattattaaagatagtcactgtttatatgcaatacagggagaattctggtctatccttagcttttttcctacatgaacaaacagtgtatacagatggggaagatccttctgtgtatatgtttgtcttattggttgataaataaagcactattggccaataggaaagataggtggggctaggagtcgaggaggattctggagtcaccatgtgagcccgggaccataggatgcatgccactggcatcctccataagataagtctttataaaatatatagattaatggttatggttgataattaagacagagctagcaaataagaaatcctagtcactggctagcagcattgtaactaatataaatctctgtgtgttattgggggccctaatgtggaggcagaactcaggtggctgttggaaagagttatctttacagtatacacaaaccaattaggccagaatccatgcacatatatattcccacatgaataaatagtgtacacatgagctaggtgggcttgagtgtgtgcacacaaatatctaggttttgttttgttttgtttctgtctgcaataatttacactcagcattaaggaggctggggcatgaggatgactgtagtttaaggcttctacggtagtttacattgttacatagggaatatacagcacccccaaagctctgtcattttcatacatggtccccaggttactgacatgtttgggaagggctttgagaatttaataactgatcattttgagtttgctctctgctccctgcttgtatttagagacaagagctctctccactgctgatccagcacagtgcctacctgtctgctgccatgcttccctgccatgacagtgatggttactcatccctttaaaacagcagttatcaaactgtgggatgcttatcagatatcctttcatatcagatatttacattacaattcataacagtagcaaaattacagttgtgaaggagtaatgaaaataattttatatttgggggtcagtgcaatatgaggaactctattaaaaggtggcagcgttaggaaagttgagaaccaatgatctagaatcataagcctaaaataactcttcctgctataaagtgcattagtcacagtgtttatcacagcgataggaaagcaagaaatataccttaccaaaaaccaaaagccaaatcaaaccaaactaaacatctaggggcttttgactattcacagaaacaagttgcatcacaaaaaataaaatgtctaaaaaccagacaaaaacacattagttaacaagtgacaaagaagctttactaccttctcacttaacataacctctcatactgagccacagaaatggtttatttaaacaaaaactagagatcacacaatgaagaaagaaaatgcagaagaacttgttcaatgcaagtgctgtggacacccgagacaggaagcaggaaaggattctgctaacacatcagctaatttgggtgctgcagaggaaatgtcagcccaaaagatgctgctgaacgaggaaaatgatccccactgcactgagcccagcttcgaatctttttgaatgaattgctgaaaaggacaatgaacatggccccatgaatactaatgaaggcacaaagcaagttccatcaactttcaaaagtgatgtaactaacattttttaaatgtcatgttattaatctgggaaaaataaaggaccttgtactcagccatacgttaacacaagctacacagcaaacatacagaggtctcaggcaaaagaatgctgttgttatacaaaaatatttgtgttctgccaaagaagtctaaccagtttaaaaaaaaaaaaattggggtgtagagggaaggggagcaaaacaaagccataaaaccctttaactactttcaacatatcaaaagaaaacaaaggagccagttaaataggtcagcaggtaacaaacgacacctgccaccaagccttatgatctgaatttggtggaaggagagaagcaatccctacaagttgtcctctgaacacacacatatgccacagcaaacatgcactcccatacaataagtgaatacaatcttaagaagaaggaaaagaatacagattccagaaaggagtttttaaaactgataattaatggttaagagtatttgttacccaatcatgaagaccagtgatcagttcccagcaaccacataacaagccaggcattctattctgcaaatccttttaactatatctgaggctacaatgcctttttttttttttttttttggcctctgcaaatccaagggcaggtgctcatgcactcatgcgcatgtgcacacacacaccaggtacacctacactcatagagactacacatgcaagtaaactaaactaaaatagagtaactgatacagtcactagagattcagtatcaattcaactcccccagagagtcctggagattggagaaaaagtggtcaatgaacccagaaaaaaatagattgactgatcaaattggtcatgaaatgttcctcaattcttttattatttttctgttttaaagaaaccataaaattctcaaagacttcattagcaaactaccaacaacacttaccccaaatttctgtcttattctgaactttgaacattaaactcccctgcatgaatgtaaatagtattttttatttatttacttgagtaatttgagacttacatagaaaggggaaaatactaaggaactagagatactttctaaacaaaatctgtttgtctttttttttttttcctatttttttttttttttaaggaaggtcaaatttcaagaaaagctggtgcttcacactgcatgagagttctaaccacagctgcctcccggcaattctaaaacagtaagatcatcatgagggcaagttccagaagggatttcagactgtctagtccatcacttgctttaacttaacagaaacttttcaaaaacccattctcttttaagcatgtccagataagaagtgctgtgcctcccttggcatctcaccacaatggtggtcactcagaggacagctcccatagatacttcctaaactcaatcatactggctaagacataaagatggaaggttagcagaatcattctctccatgaccacaattcattgaagactaccttgacactcactgcaaaaattttaaaagatttttacacgcactatttttggaactttagattcaccttatcatcattacctgtccctgtgagtgtctgccaccgcagaagcagcctgcctccaccgccaaagcagttgtatcatcccctgtagccatgtgcctttccaccgtcagctatgtgacatatgcaccctttaaaagtgcccgccaggcatttttgcctctagtttctcttgcctcttactcctctccttgtctcctttcctctcttgcctgttgctcctctctcacctcttcttcctcttgtctgtctgcctctctggagaccccaccctgacatggcctttcactcttccgctcttcccctccccaattaagcctcttgcactaactctgctgtgcatgatgtgtttgcttattagtggcatactttggcaaagcctaccgaaaggtacccattatcaccttttctttttacttatcatttcaatcccactttcacatataagaaaagttaggaccaactacaaagaaactaagatttcttctgaactatgaaaatctcaagatggtttaactttcccatgcctggagtcaaaagctggcatatacttgtcacagtacacagctgttactgagtcaccagcctctttgatccccttcccatcttgtaacccagagtaagttcagaataagaaattgtattttagggaaaatgcgaagtaaactcagaggtcttgcatctaccaagaattcacatgtcatttcatgttataaattgacagtgtacttttgcaatagagatttgtgagctgagccagaatcattttcctccttccactcgcagtacccagatgtcccccagggactgtcaatcacattgaccagacttccttcctctgtctaaagaactagcaaagaatccaagctaggccaatacaatcctttccccaggaatcttgagtctgaagtgagtgatgaaagactgaaattggctgattttcatctctcccaaggccagccgttcagcttcttaggcctgctgtgagctcacaccttcagaagttttcttcctacattctgcttctgcagcttgcaattctttgtctcatctgacttttcagagagacaaattaaaatatatgtctgttagttctgtttacaggtggaaataatagttctgtttatataggtggaaatccctacagtgcaatcagcccatgataattctgtgaactaagaaaatgcccttgtattgttggttttcattttatttgtttatattttttttaaagtagcaatttcttattcagttgattggaggcaggaacacagtgatacagccttcagaattttggctactttttctcggaaaatagctttgaggatcttgagggtttttaagtaaatgcaaaaatttcagaataatttaaatgggtttaatgtggccctctccatttttaacaaatgtgtatgactaggtgtgggtatgcatgtgttgtgggagattttaactgaattctgatactcttgagactgccaataagtttaaccttgaatcggaggggcagagttagcaactggctgatcagaattagccatagaagttttggaagacccaggatacatatagagagaaaaacaaagtagtagggagggacttagaagtattcaaaggcccttttgaatcaagaaggagggagatgagaggtcactggttgcttctctgatcaatcaggtttttacccatatctgactccccaatttttattgatagaggaataactagataaatgcttcatgcatgcacatatgcaagagtgtgaaggccagaagacagacaaccttgctaccactctcagggtctctcattaagcagaagcttgccaattaagctagctggctggctaatgagccttaaagatcctcctgtctttgcctctgcaatgctgggattgcatgcctgtgtaaccatgcctcagtattttctcctggagtctgaagcgtgaactcagatcctcatgattgcaaggcaagagctttactgactgaatcatcccccaaacctacagagctaccttcctgggacatgtcttccttgttcttaggcacaaggcaagtgttttactgactgaatcaccccccacccccacccctaggaagctaccttcctgggacatgttcttcctcattcttagacactgtaattctggtcatcttactacccctcctctcagaatgaaaaggaaaagcagatgtcatcctaacaaagtcctcaggtactcaggcaaagaggactgtaagtagacaagtagacaaaaccagacaaataagtctggtcatcagaacttcaatactaaacttagaaaccatgtaaggctgagaatcccttgtcagaaatacttataccagaaacattttagagtttcgatgtttttgatttggtaacatatgcatacatacaagtatctatcagatgggactttaaacaatgtcatttctttttcattgtatgtacatagcatggtggaaattttacacagtttttttttctgttgttgttgttgttgttgttgttttaagtaattttactgagtttacacgagggaccagcaagaaggctcagcaagtaaaggcacttgccatatatactgacaacctgaattcaatccctaaggactcacttggtggggaaagagactgattcctacaagctatctatcctttgccctctacaatgcaccataacatttgagatcttagatttttcagatcagggatgctcaaaatttagaacaaaaggaaagatggaattgtagtacaagatgagtcctcaaatgtcatttcatgtaactataccaaactgggtgcttttctcttgcagagactggcaatgggacagactataaatacttttacactgtctgataccctgacttgacagttcacagaaatcacaaatcagctgcaaagggataccaggtccccctgcctggagtgctctacttaatgagcaaaagcctcagctttgtttctgacatgttggggaaaatataaccaaagagcatgcttgcttcctgcaaggtaccctgcaatctgactgaggagataatgcatgcacacatgaagcaaccacaataggaatacaggaacaacaccaactgccaaatccagaccttcttctccaaactgtaacttcagacaattccctagccacgctaactcaaaggcagtaggctgcttcctttttattaacaaccaaattctagaccaagacagagaatgtaatcaaaagagcctatctgtgtaagatgatggaaatctactcttttagaaagaattaaataatgaagtaatctcatggttgacactttgcataagcaagttttactaaatgacaatcttctttatcattagctatgaacacttgtattcggagaaaggacaagatgatatttataaataaacaactctagatcactgtgtgttcaaaagaaatcctaaaacgtgttcactcaacttagggtggttagaaagcagctcaccaatatataaacaagcttatttaggaaaaaattccccaatacaagataatgggtacctatactcaagaaaaaaattaatcttggtttggtaaaagtgtgcacaacttactgcaatttattacaagctgcttcctgagtttggaatccttagaatagagtaaggcttataaaaagacacacagtgctatgccatctggtccacagcttcttccatagccagaaaaacttcccattcaatgaagtaacacttaggcaatatcaaaggaaattccaatagtgctgtggcattccaaaagctagaagcaattttgcaactgtgaacaatttcctagtatcaaacaggccagatagttggttaggttaccttttgctttataacatatacaagtcaataaggtggagagtgatagaggaagcatggacctctggcttccacaggaagcacttgggcacccttgcatacacagaggggaggcaaaagggagaggaagagaggagaggagaggagatggggagggggcacaggaaggaaggagaagggaatgagtgcatttctaacacctactgtccattctagaagtgctaagccaccattcatgaaccactatgccaaatgtcccaatgagttcacttaccttattgtgctcatacttgtatggaatcttgagagtgtccatagctctaatcatggcctgcatggcggtgaagatgttctgatacaccagtttggtaaagcccctcttgtcttcatcagagtatccggagccatggatgatcctcatctgcttgatgaaggtactcttgccgctctctcctgtccctggaatggaaatggcagcagcacattagatcacaactaggaaattgcctagttttgcagcccccaaaagacctgctgagagaagcagccatacaaagcctacctacagaggacacttagaaaatcagaccagtgacgatccatttcaaaggcaaatgagctcaaaagctattcgaatcttaggaaacacctgagcataaatctaccaaacaccatttgtaaccctacacctttgagaaataagcgcaactgcatcacaggacaagggaaaagaactgaaacttgacaaagccctttccctgggcatatctgaaatgcatccggcactctggaaatagtgataacattatactgaaacacttcagaaataaacaagggaagaactaaaacctaagacattttactccagtctggaactggggcaaaataggcaacagattcctgttagaccagaacacaggttatactctggacaacagtattcacagtgtttatttccagggcctgtcactcatgagaaacaacaaattactgttagtacatgtttttcttctcttcaccatcttcaatatacatttttaaatttaaaactgtcacatttctgaacacaagtgcctttgtcctgtccttttccactccccaacaatgtaaagaacataaaaaaaaaacactatgaatatttaaatatgaaagaacagaatgagaagtgacagccttcctcccaacaagtctgctaagaacaggaagagaaggaaaaagggagcgagggagggagggagggagagaagggagggagggagggagggagggaggagggggagaagggactaagcaagaactgcaaatgcaccctcattccattctgcttttctgatgcttatagactttattactatcttcataaacgatcaagaaaattcaaataaatactaaatttttttactgaagtgtcttaactgtcaggcaatacagaaccctcagacgttacagtggaaggtgcttctggacccagtgttctactctaggtggtttgtttacttatttatttcatgtgtatggtaccatgcacaaacatgtgtgttgaggcccaacgtggatgtcagggattgtctgctcaatctcctccatattcactgaggcaggttcttgcaattgaacccagagctcacagatttcactaacataactagccagcctattctaaggatcccttctcacctttggggcctcgaatttacaatttactaggagtagggatctgagcaccagtcctcacacttgtgtagctcaggctgtatacactgagccatgtccccagactgccctatgacttttaatggggtgatatagaacaccttgaaatataagctttcacactgaaatgtgaaaactagttcacatttacgtggtgttaattcaaaaattataatgcccaccacaaataccaaatatctgaaaatgtttatctccagtaaaaatgcagccacaaattagtaatttttattattaatctacattttatagatttattaattatattctacattattaatctacaatttatagaaactagtaccattactttcttaagcaattaaaaagatacaagaaaaaaaaagtttaagatatttgctttttattactgtccccatccaaggacttgttcttgaaggcagactgtagacatgaccatcatagctctgccagtcctttatactacaaaaatggcagagatttttcttttagagaaaaaaaaaagtgtatacacgtgtgtgaatgtgtttatgtacatgtgaagggagtgcccaaggaggccagatatttcctgggagttgaattcagattctctgtaggaatatcaagagctaagagctcctaactactgagtcatctgttcagtgccaaagattttaatttttaatgatgtgttggggggtgggtttgtgtttgtgggtggatgtagatgccgagggaggccagatgagggagccaggtcacatggacctgaaattatagacagttatgaaccacctgacatgggtgctggaaactgaacttgggttctctgcaagggcagcatgtgttcttaacccaccactgaaccatctctccagccccaagagatcttaatttgtaagatttatgaaaaggaaaaaagcaaagagagtcaggaagtagggccctttcctcttggtcatttgaaaaatctttacatgattaccctttaaataaaaagataaacaattcatgaaatatgagctacactggcttgtgtttctttagatcattttaggcaagagcagccaatatttgtcatctctttggatatattcctagagcccttaaaataataataataataataataataataataataataataataattacattgataatttaatacaatattaatagattataatttattatatgcttgtttatttaatataattaatattgatgatgatgatgatgatgatgatttcctattgccagaaacagaaccagggctcctttccccttcccatattattgggtgctaccctgagagctgccaggcacaggtttcatgaacatcctggcctttgacttacacttacagcttagccaaaacaagacagaggcagcagtgagaaagcgggagtcacagtcctacagtaactactcaaatgtgcaatggccccctcaccagaccacaagctactgttaagtagtccctccatatggctttcctctcttgagattttgtctcttactagcccttcctacctacatctggcccacacttttataaatcgctcctcagttactgagtggaagtgtgtcaaatggttgtggccagaactgactacaaacctaaaggaaaacagaggacaattaaatgatggacaggaattgctctagaagcttttctatgagttactctctggtttgtcaagtacaacattttcagcacttcaatctcaagacactcttctgaaggtcaactgtgatgaagaaaacccagctaaaatgtgaaaaagctcaaaccagaattccaggcttgagtctcccctcagcactaagaaacatagtaattaattaaacctattagacagatggtgtgcatctgtacacagaacccccctacattcatattctctctctctctctctctctctctctctctctctctctctctctctctctctctctctctctctctctctctctcacacacacacacacacacacacacacacacacaccacaaaggacacagtgatttgtgctttctggcacctcttttgtaaacaaaacaaagaaatttgtacacatcctttatactttaccaagcactcttgagacacgctaagttctgtcctgtcaaacgtcactgatatggatgtctgaatcatcatcctactgccctgctattttttgctacaccaaacatctcccatcaatcatagaatttaataatatttaacaagcaagacaacattcagcaggatgtgagacccatgagaaacctgctttctccttcagtaattcacaatgaacatggctagaaaatgtccctataagcattgcttgtatattcaggaacatactctgcatttcttatactagctcctccacatactcagacctaagaaccatgctatatattaaaaggccatttcatctagcatttataagtggctgcaaagaacactatgctttttcttctccactccctgaatcaggataaagaacacaagagtattctctacttcactcagcatcacttgtcatcagaacaaacattaaacacacatttaacaccctacaatggagtacatggcttggtaggatgatatatatatatcacacacacacccctctcctaccctcaatgttcacagtttgggttttattaagatcttttcaacacaaccaaaacctacagagtctgccacaattcttaattttttcatccaattcacaggaagcattcatacacttatgctaattattctgccaatttgcatgatgtgatctgcaaatggttttgtcaaaaatgactttcaaatctaatcatgtattatctgaagggtcatgaattagcatttattactgaaatgcaatcatagatttagtggtttgctctccctaattagcatttttgttgaactcattggttctgtctcacactcagactaccttctgtactactctcttataaaagagcagccaatgcacaatcacacacccacaagcattcctcaatgctctgaaaatgcagctcctactgtgcctgttctcaagaacttggtgcccatatacacacaaggatccagcagaacaaacactgacattaccaagaaccctaacactccagctattcatcttccaccctcagagaaaaaccggagacacctaggaggacttctcaacaggctgaagtccatccacaccacttctaggggtttttagattctgtagataaaaatgccaaacacagtcaggaaaactgtagtattgaagactgtacagtgaatacattcattccatactgtcagggccttccttgactgtatttagagattgtgaagtctacatctaaagccctagaatgaatattaaggctgaggccaaatatcccgaccccaccctcctaattggccagctcccaggtaaagagagagaaacaaaatgcaaggctcatgaagctgagttacaagccaatgaattgtttcaggtccactgggataagccaggaatataaagcatggaatctcaggcccagcaagccgaacttgagctacttccatgtaaacttggacaaagtagagccagatacttcaaggatgaatttctaacaaggagcatattacccacccacaacctgggaagaattaatggaaaacagtaagataaatgtggtcaaactctgagtcaaatgcaatccgtgtgttgtccacactccaggcaaactacttggaaatgtacattccgccttcagtgtttgctcccctcacacagggaacctgcatttgaacctgggcagctcttacaaagtcattcaaacttctcttcacacaactgtccttcaagacaagggctggtgtatgcaatcatttatgaccagtggagtcttgcagaaactactagacagtttttaaaatatagcagaaaaaaataactaaatttagtatcatcaattacgagtagaaactaaatggaccaggaagtttagtaatagctaatctagttaagttgttttcaaaaaataggcagacaaagtgcattgaaatttcagctatttattggaaatattttggagattatttggccctagtttctgaaaatagttaaaacctcatggaaaagttatctgatagtcactgtaaggctcaccaaagtgcatatatgtccttgggagggaggagggatggagggaggagggatggagggaggcaggaagggaaggaggtgcaggccaaggggcaacatcagacagtattcctcagaagtcgtttatgatttttttagagtaagtctcttaggctggaacttgccaagtaggtgagcgggtggccggccagctccagggatccacatgttcaaagtaccaatgctgacacaaacacacaggaccacaactgcctggctttaacatgggctggagatcagactgtgatcctcatgtgtatcaggtaaacactttagaaactgggctatctccaagccctactgctcttgctttctttctttttgttttttgtttgcttgtttgaggttttgtgggggggttgtttgtttttgttttttgaggcagagtttctctgtgttgtcctggctgtcctgaaacttgctttgtagaccaggctggccttgaactcagagatccaccctgcccatcagtctttctgatgtgcccatggtaagaatttgtgcactaaaataatgaacatcaaaagccaggcatggctgcagatgtctgtaatcccaacactttggaagtaaaggctagaagaacacccattctcaagaatgatatattctacagaatgaattctaggccagtctgagctacacagcaagactcttgtctcaaagaaacaaaaacaaacaataaaactaacatgactgtctaaatacactaaaagccctgaatgtatatacttttaaatagtggatgagcactatctcatttttttttaatttaaaaaaccagttatagtttggagaacagaaagcatcttcatagtaaagctttatgggaagtcctatacacccatctgctcaccttcccaccttcctgccctagaagcccataggtactacttgagagaaaactttcaagcccagaaatcactggttttacagaagaggaaatgactcattcaaggaatcttctagttgacagtttatcaggaaaaagatagactagaacctaccacagcctcctctctgtgaaaggctcctgaccttatacccatatccactgaactatctccctacatatcaaagttaatattcatcctagaaaatacttctaaaattagaacattttagatatttctttccagtttctttttctaggtaaacgacttttgttttttgttttgttttgttgttgttgtttttttctgtccttgaacaatgctatattgtttctatttgccatctgtggtaagtattccatgatactagttatgggtttttttttggaaattattagtgactatctgaaaggctgtcataaggatgtacagtacttaacaattcccctggcataaggcattctgagtgtttccaactccttgacttgtataaataaggaacacccaaaaaaagctatggccaactctacttccaaagaggtgtaaagggtcagcacagacactcgcacaagtacaacctctgggacagagctgggttcatacagttgtactcctcctcctggcccacctccagcactaaatttttagatacctaaaatttaagaaaaagtaaactttattttaatttatatattcacttataataaacatgttctaaacttttcttgcctgtattgcttctctgaacttatctttacttaaaatgtcattgaaagaattactttctttgttatttcactgcacagttttgtttttaaggtgaaattggtgcttgggcacaagcatttccctaatttgacatctttttatttactgatttaaaaattggtgtatacatttctcacttattgagtttactcatctattttcctctgatttctttcatttatttgtgttattaaaagtctcaaacacatagatattattttatgaaaggtttatactttatactttctctctttatattaatgtgtgatgtgtagtgtatttcatttcataactcaacaatttttcacaaatccagtctacattctaaccagagtgaggtgtccaacctgaatacaagactgttgcatgtccccttacctgatcagaaatgttgagcaattaaacacatgggctggaggttggggatgtgttcagttagtgaagagctcggctcacatacaggaagacctggattgatctacataaaacaagcatggtaacccacacctgtaatcccagaatttgggaagcagagttagaaggatcagaaaatcaaggttatcctcaactacacaacaaagtttgaagctagcctgggatatatgagaccatatctcgtaaataaataaactgaatatatgaaccacactgagtcttatgacagcatcacgcaaattcatcctttatttccttcctggtaaacttagctaatgacacttccatcactgacttttgctgactgcacatttacataatgatgtactccaaagaaaggattgcagaaaaaaatattccagaatgttaacatttctaatctcctctcagctttataaatctatctgtaccgacatggtatatactatgtatcactaaccactctaggacatggtatatattatgcattgttaatcactctaggacatcttatatattgtgtatcgttaactaatctaggacatggtatatactatgcatcccttaactactctggttcctcctattgacacatttctggctatgggtaagttcatactttgtggaagcctatgttctcatgcgcacactctagtcctctctagggtacagcccaaccctccacaatctctgcaactgcagttgttaaacctcaatgtctattttgtctttttgctatattcattagtagatgctttttgcctcctggcttggcatttatcacagactctggccataaactcacactctaaagggtgacagcaaaaccagcatgggagatgcattcttcctataaatctcagtaacttcaacatacaatatttttcctatgagaattttcacttaaacgatgtgttttgcagcttccatttggcatatgtgaactgccattatcactactcttttgcttcagaggcattattaagtaaggttacctcaatacaaacactgattttactttaccacagtcaatcagataactgagatattactaaatacctaacaagatgatagcatatactgagtggatacatgggacaaaggtatgattaacatcacacagcaagcgagggtagaggcgtgacactacatcctgttactttgaacagtatataacaaaatacaaattattcatttctggagtttcccacttagtatttttaggcctcagataaccaaactgcagaaagagaaatcccagataaggagagaaactactgccagttttcaattagttaacacatgttaaaaagtatctgctatgtaaaaatcaatatatactacataaaattaaaatgtaaaatcaaatggaaaaattagaaaatattaatacaagcctgggtagagtacaaaaagaaaaaaacaccaactctgagaaacattattttaaaagtcaaaacagtccaaaaggatgcagattgaacaaaccaacacaagactacatagtgctgacttgaaatgtgctgtaaatgcaagggaggacattttcaatttttatcctgcaagtattttcctcacctcgccctagtcttggccctgatacaattctctagtcctcaaattctgaggtaatgatctacagaatattagtattaaacaccatgcttagacatgtgcggctcaaaccatgccttcatcgttttattgagtttgtacatgatagtctttcaaacttctaggacacaaggcactgttgccttaacaaagagaacactaggagttgaatgtagcaatacactcctataatcccaatactccagaaactgacggaaagggacggtgagttcaacgcagcacaactatacaaagagatcttgtgtgaacttttccttgggagacaaacagatagctattctccctagtgagtttaattgtggttatttatgaaagcatggataaggaaaaagagcataggcaacttctgagccactacatcactaaagatgctgactaaagatgcccttcccacctccatgacagaaagctcatcaccctactcctgagcaggtcccatatgggcaatcacagctactgcttaaagggccatgctgggcccagagggcagcaaatatgcacatgatatatggtgacagatgaagaataaaatattagtaggtgatgggtactatgcatttaacaactaaaagtgattggacataatcactggttggacataatagcacaagtctttaatcccagcactcaggaacagaggcaggcagatagatctctgtgagttcaaggccagtctggtttatatagtgaattctaggataggcaggactagatagtgaaactctgtcttaaagaaagaaaaaaagtgttgttccttttagagaccagggaacaactttttaaaaaggtacactgacactaatgtctgaatatccaagattccaccacaacattattaggaaataccattccaggctgtggagtggctaaggtgaaatcagtgtggggtggaacttagctgtagggttaaaaggaaggcagagggccaatgtgcccaagacagggtgagaaggaggcaggaggctttcaggagaaagacccgagtggcagagacagtgttcaaggaacatagactgttatagatcaggaaacacgttcaaaaaaactttaaagcacccaaaaaaaaaaaaaaaaaaaaaaaaaggaagcagaccacacagcttggagagtcttgaaaggtaaaggacatgttctgctgtgttcagaatgggtggtaagaccaagttagtagggtactccagtgatccaagcaaaaagcaatgggaatttagagcgagagcgagatggcaggagaatggatatgtaatattctagattagagatggatgggatgtggatggtaagggttcaaagtgggagaaacctgacatcctagatggataaagataacacagtatagagaagcccatggtggagactgtggagaaagagtgcattcagccggtactgtaaactcattccaaggaaaagccttacctatactataaggtctgcagcattgatgtggaagataaccacaacctagaggatatggtttatgtcccatatgctcaaacaaaggcaagaacatggccattactgagctccttctgttaatagatgagtcagagtgattgcaaagccagggttacaattgtatttcctgagataaatatccttagctaacaaagatattgtgatctctaagtttcatatacatttatttataatgcgacaacactgctatgaacccacttctttacagaaagcaagcactccactaatgttatttggaatgcatgaagggatcatgaaaataccaagtcaaaataataactacattttaagaaaagaaaactcttcagactaaatattcccccacagaatttagcattgatttttttttcataaaataaaaagcatgaatgcattcgatctggatttttgggtcacacataaatgtatccctttaagaaggaagtgggcaggaaatggtgacgtgtgttccaggaaactacgtgcagccctcagtgagcactacctaagggcaggtcacgtggcccttcctgaagcaagcagcatacctgcagcaagggacaagcccaaggtggacctgacatgccaatttccatcttcacattcatcaactcagccacaagcaggcatatagcatagacagcctccacctgagcagggccctcctagcccctaacccaggacccatatggcttctggaagctgacagagagcaaatgggcctgaggaacactaagggttctcactggattcagattttattatttcccttgtctatatattgttttacaatcttagaaaccactagttatgattttctcataaaaaaatgtcaacctattatttaatatacactcaaattatcaactcaaaggaactgaaaactatagtagagtttcaagatgtccaacagaaatatgagtcactttgagcctgtaaaaataattatcctttaagacaatcttaatccttaagattaaggtgcaagaggtaaaagtcaatccaattaaggcaatgatctaggatgtctcaatagatagacaagagctcagattgaagaatttggcatgctttgtttgattgaacaccaatgatttcaaatggcactaaaaatactaagaaggacttgtatgtgctccaagactgcctagtagagacaatgtacaaagggattggaaaatggaatttgttatggaaaaacagaattgttaaatctactcctatgcaacagttattgatgaacattgtccacgtggcaattgagattagcgaaagtgaaaatttttaggaggaacctgatgaaacagacctataataatgatcaaaaatatcagtacctatgaggcattactattaataatattagtaacaataatatcatccagcaaggattcttggctaatactgaacattatttggaacacaaagatagcgaaaggttaattttagagaatctagtaactacagtgtggaaagatgaactagcaatcactgagttctcatttcctctagaacagcagttctcgcctataggtcacaaacccttcagggagcaaataaccgtgacaacagagttggggcagggcttcaaacccaaagctgtcacccacaaccgacattagaatactgacttttttatcctgttgtttacctacagctttcccaattatatttaccagctacttctttttaatcgaatggaataactgataaaatattctgctatcccacaaaaatgcgatgagaatatggagatgggaaaaccttccctgatgatgtagtctttaaaacctatgactccttaagagcactgagaaatcaaggacaatcaggaaacagagacagacctgtttcaagatatgtgtgtgtgtgtgcatgcttaaggtaattaagacactgctgattttatttcattataaaaaaaataaacttagaaaaatagcagcacaactgagataattcatatactacccaactgatccatttaagcatataacttaatgatagtacatatgcaggtacccatctccattagcaactttagaacattctttttgtgggtaataaatgttctaatgggttatcaagcaggtaacgactagaaatagcgattagttagctatataagctacttgctagatgaatttcctttcccttgaccattttcttctctaacacataaaagtgaatgtaattaacatcctaggttgatataaatgggcagttcacttctccaagaaagacccagaaaaaaagaaatgtgcccaaaaaagttcctggtgtgtggtccaggcagaatgtatgggtctgaattgtagagtgaaaatggaccagaattaaggatttaacattgaaaggacaggctatggctgtgctgtgtggtgggtggaacagggatgagatgagtgcaagagaatatcacagctccattgtaggagttggagaaaatggtagtagcatgcttagcccgcccatcagaagatgccaaagaaaatgtgttgctttagtaactgcattcatctacagggcacagcagcttgagtacagctctagaaacctgtctcctgtgcctgtggtagaaaaacactgtgcagcatgtacagctgaacgaacattcagccaggggtcaaagcatgggacacctgatgccaggtttaagatggaaggagcagatggtacaaagtaggtaggactgggaaggcccactgtccaatctgaacaaatgaggaatgtgtaagccaggaggggctgtgtgtgaggactgtccaggatacctgaagatgggaacaaacagatcaagtggatcttgcccaggacctctttcctagtgttctcctatatcaagtgagcccctgtgcattcctaatgagtaaaagaaagaagggtgaggacgatcctagaaatgctagcatagacacataatatatgtgatcttttatggcaatggccactgcattttgcctcagaacctcctccactgagggagaagtaaacttttaaactgtgttaattcgggcagtggctaggaatgagtcatatgccttcagtttgagcagaaagtatgtccctatatcacaaagaacaaaacatgtttcttcacacctcccaaggagacttagtcatcttacttgaaagtcaattatttttattaaacttacctaaaattttggaagggctcaattgatatcccaaactactgctgagtgtagattcatgcaattttactagtttgggacggtataaaccataagtgattcaaaacactaaataaaatccaccctctttcctctcccaatttatccccagaaacccataacctaaactacaaatcacttggggggatcattacagaaatttaatttcaacctaattttaaactaattagactgtcctataaaaactctaagtcttcaaatacactgcataaaaggaacacctctagttgtgggttgggtactctgagacatggttattgaattctttttttttttttttttcctggttttttgagacagggtttctctgtgtagctttggagcctatcctggcactcgctctggagaccaggctagcctcgaactcacagagatccacctgcctctgcctcccaagtgctgggattaaaggcgtgtgccaccaacgcccggcggttaatgaactcttatccacatcaagaattacaagaccaggtggcaaacttaggacacaattatttttttcaagcaaatcaaataaattaagtctgattgcaataattcacattaagcattcccttctactcaatagatcaagctggccatataatttatcatctctaacagataacttttgagagtagagggaatactaataaaaattatgttaaaatactaggtacaaagcatggcaatgagagtcaaactgggatgtatatatgagtgccctgttgacagcatatcctggaatgaaagagacttgagagagcaccatgaacaaaatcataaagctaattgcatacaggttatcggatgaaaacgagaaagatcactggtacaatactcctcagagcacgtaggtctacaacacaagaataaaaagctatggggtggcaccacccagaagtgacccacgtcttacagacctagtctggaaccttaactgtaagaaaaagaaatcacctcatttatttagcctttgtctgctcctagataatataagattatgtgactataaaacaaaagttagcaaagctaactaaaaatttagaagggaaatttaactagaaattagaagactgtattaattgggaaacagaagactttattacttttctcattgctgtgaccaaataaatcctttacaagaagctactttagggaaaaatagtttattttggtttgcagtttgatttatctatttttttgtttttttaaaagattttatttgtttattatgtaaacagcattctgcttccatgtatatctgcgcatcagaagagggcaccagatctcataacggatggttgtgagccaccacgtggttgctgggaattgaactcaggacctccggaaaagcagccagtgctcttaacctctgagccacctctccagccccaatttatctattttttttatctgcactcgtgatatatatatatatatatatatatatatatatatatatatatatatatgcacatatgcgagatcccctgaaactagagttacagagagctgtgagctgctgggaattgaacccggctcctctggaagaacagtcagtactcttaactgctgagccatctctacaggcaccttaaataaataaaataaaatttattgatttgcagtttgaatgggcacagtacatcgtggtggcagcaagagtgtatggccactgtcacactgcatgtgtagcctgcaagcagaaagcagacaggaagtaattccaagctataaatgttaaaggccagtcccaagaaggaactcacttccttcagcaagactctacctcctaaagctctgtaaccttccaaaagatcagcaccagctggaaagcaaggatttcacaatcacaccacagcaatgactgacaggataattctgtcaaaaagtaacagcactctcagaaatgagactccacaaacttaccactgtgtcagctcaggtcatggaggaaattctgaaatgtatgtgagcaaaaatatttacaaaagaacaaaaagaattcatagcaatgggaggacaaggagatggaggaggaaaaataaatatgtaaagtgtttgaaaatcacattttaaaaaggaggaaggggctgcatgagctctgatgttaggagaacttgcctagcatgaaaaaggtcctggatgtgatccccaagactgcatgaactaggtgtgtgcacaaccggaattccagcccttgaaagtagaggtaggagaaatgagaagtccaaggttgtcttgtctgcatagggccagcatggattgtatgagaactttacaattttttaaagccaataacgaaaaatgcaatcaaaactattttaatgactaattcagaaatgttatcaaataagataattacaagtcacatagcagtaatacactgctgtctgtatggatgggaaacatatctagaaatgacaacattcaggattctgaagcctaaggggaaagtggcattctacataccagtgcaggaaacacaggtatccacaacgcttttcagcgaactcgagtcacagctatgacacattcaaatactaccacacacttctgcattagtaattctactctaagaaatgttacacaagggaatatataattagcaaatgttggctacaagatatgtgtcatgcagttaattaaaaacattaaaaattaaaacctaaacgttcaacaatggagaacagtaaataataaaactgtatgatggttgaccatagggccatagaaaatggtacttactatattttattaaatagccaagtgtagattcaaagtccttatgtaaacatgctttaaaaaaatttacacatatatatacgcataacattacatagaaaggggtagggtgaaactatttataataaaatgttaaaattaattatatctacgtggtagaatgagacatttctcatttcctttggctaacttacgttttcccaatttagctaatttaaaaggtataactttctaaaataaaaaaatgttaaagattgaaaagtctacattctgcctcatttcaggggactttaccttgtagtgtgacagacatagtaacagagctgaatatcatgtcctttaagtcagaagacagcaaacataatgtggtttagagaaaatatacatgaaagccttaaaaatggccacacattctaaaggatgatcatattagcacaccatctgtaagacatcccagaattaagccccacgttgtttactaataatttacagtggctaatccaccattctgagaaccatgaagtcatcacaaaatggctatctaagagcataaaggagcaggcacacatgtagtttaaagccttggtcctttttctgatactcaaacatgtggttttgaccccagcctcatggagcacagctataacccaagcactcaggcagctgaggtgggaagactaagtatttgagctacatagcaagttctagaccaggctgtgctaatcagtgaaaatctgtctcaaaaaataaaaccaaaagtcaactttgagcagccacaagttaaaatccacaattctctcatattcaataagctgagctgataaatgtccaatattttctctttgtacaataatacagatctctaatatatacaaagctacccaagtaaagcttcatttcctctaccatatagacaaacacatggggaaaaaaaatggagtacctttatgaagaacaacttatcttttactttaaagctgccccagatcatattaagaaaatatcaggaaaattctttctaagaacattttacagtaaaagaatgttcattatgtagaagaggagaaacagacaggaagtataaaccttaacaagcaaggtctatatacagtattttatagtttttatagcagggatcatgaatcttcagtcatacacagccatgtgtctttaccataccatcacaatcaagctacttcataatgttgcatctatgagaggcagactgtcgtctaacccattcttgaaggtactccaatcatctgtgtgtcatcaaggtgcttcatctcatattcagacaccaacaacaacacccctaggctagatacaaaactcacagcccttcctgggagcttcattggtccttcatataagtctttcaattgctagggtactggtccaacctcattcattattatgtaaaaggaaatctgctattctgatacgaactaatgtaagaatagctatgacatgcagctcatcttcataataagtaaattggcaataaagaggactctctctctccctctccctctctttccccgctctggttttttgagacagggtttctctgtggcttcggaggctgtcctggaactagctcttgtagaccaggctggcctggaattcacagagatccacctgtctacacctcccaagtgctgggattaaaggaatgtgccaccaccgcccagctgacactttgtctctttaaagcgactacaaacccagggcttcctgatggtgacacctgtgacaagaacacttaaataattccagtcttcaatcccagcaactcagggggctgaggtaatactgttagttcaaggcctttctgggctgaatttaaagaccagcctgtacaactcagtgagacttcggtctcaaaataaaaattaaagtaaggatagaaggttagactgcagttcagtggcatagcacttaattgacttgctgcaggtcctgggttcaatcctgaaggaacactaaaaattttactgagcattcagttatccagttcctgaaaaaacacacctaagtcactagcaaaagaaaagagagagaggtgggtggtggtggtggtggtggtggcggcggcggtggcagcggcagcgcacacctttaattcctgcactcaggaggcctaggtaaaatttgctagaccagaatgtcagggttacagccttccacggtggagaactcagcaaggtatctggggaagaacgggcctatttatgtgtcagctttccggttccttccaaatctgtcttcacagtacaacttccttatttatttacttgaagtactgtaaattcccacaaagtgaggcacacccatactcaaacgtaagtacaaaaatactacaaagccaaatataaactgtttcatgaggtattcactggagagcagacatcaaacaaggctggctttctgttgcatgctaacatgacacacctcgagaaaagaagagaaccattctatttatttattttgggacagaatcttcctacagagctctggctagtctgttactcataatgtagcctaggttgacacagaactcatcacaatcctcctgctcagtttccaagtgctgggattacaagcatggaccaccaagcctggacagaggttaagaatgtctggatgaaaaattactccccagcttcacaaactaagcacttaaaacagacacaaagtgactttaaagttgctttattcaaaaagcaagtggcttataaataaataaataaataaattttaaacaggcataaaatgttcctaaggaaggagaggcttacttccctactttgtaaaatgtttaattacctaggttagaagaaagatgcatactccagaatgaaaagatcctcttaggggaaaaaaaaacggttgccctaattattcacggatgatctaattaaactgtcattcacaattcactaaagctattaataaattggaaactgggaaatggataacatcaatttataggactaataaatcctattaaacacaaagacgtccaagaactggtggcaaattttcctcaacactatgaactttagcagagcagtgctagaggcagaggcagaggcagaggcagtaggcagtaggatctctgtgagttagagactatcctggtctccagagctcataccaggtctacaaagagaaatccttctctaaaggtctctaaaggcctcacccaaaagcgagagaccaacttcttcctttgtaaatgaggaaactgtggtctactgatgtaagcaattgcccaagtttgtgtcctctaactgattttccaccacttagacagttaccacatatcctcagctacatgcacttatcaggccacacagaatatgctagcaggccttgctgctatcagtggaggaagagagcttcagaatccttcctcaacagttcacagaaggaagtactcaaggacaaagctagctggtgtagagagaaggtcaagctctgaggcagtgacatcactatataaagaataataaccccactgctagcaggcatcccaggacaggggcaacagaaatgaaggaaacagagcacctttgtgtctgatgtgtatagaaaaggaagtctgggactttcaaggtgaacaaaatatccttattagtaatctacctgaagacaagcagtttttttttgctgaactaagatagcattgtaccatcaaccaaaacatcagagtaacagaatggagaataaacaggaccaactttttgtccaggtgtccctatgaatcacgatttcttaagggtccaaacttcaaaaaggaccacgtcaccaaaaacaaaaagcaggagaaggaaacctcatcagagaggggtcataggtcatgagcgttgagcaccacagtgagcaccacagactgaagagcaaacctggagccagcccaggctctaccattgaagtgctgggaaaatctgtctttaagaacaaagcaaagatgagtgagtggcagacttctctgcactaggactgttctgcatgctttggtgaccactgagcttcagaagcagcagggaatcagggcctggctctatggctcagggcaaaccagctaatttctccctgcagcaccagttcctaagaatgtctacctcaaaccctctgtttgcagatgaaacagaactaggcccttaccaagagcactgccacaagtaaaaccctgtagctgttattatggaaaataaagctttgcacaatgtagcgtcatttgtccttttgcccatacccaacttctccccagaaacaagcctggctctttcaggttggtggccctttttctgcttcctatttcctttccccacatagccctctctgtctggcaacacctctctcattcttgtcctttaagttggccaactccccctaaggccaattggctgctccttctaggtctattatatgattacatttggattataactgcttatgtaacaagaaagacatctgtttactggaatggagagaggggccaggaccaacctgtcagctctatttccaccaaagaggcaagaagtgggcatggactagactgcatagcccagtgcagaggattaaaaagtaggggtactttccccgtgtttcctctggggcagacaggacttttcctgtctccctcttctcttctgtcctctctgtctctgtgtctccttacctctgttctctttccttcccccacttccctttctaataaaacttctcacagaaaggaagaaggaaggaaggaaggaaggaaggaaggaaggaaggaaggaaggaaggaaggacccacccacgtacccggggcaacttggaaagaggagacacaatgtgcaaaagagccatggcaagaactgtgccagcaatgtcctccctctatcttttctaaagtgtgtaagcctcgcaaaatcaaacgctactgtatacatgcatgcacacacataacatgtatacatataaggaaccagaaacaaagtatgtgcataatgtgtggggcaaatgtctctcctggggttctgctcctctccctgtcagaagaacatcaagacaaagatctgtatggaggggtttcagggacaggggtggtggagaggtgggaatgagctcacgtgtgaggaatttaaaacagtaataatttgtaagtgcacactgatgaggttacaacggttttaatgctcatatgcacaccaccactcttcccacacactcgggagatctcaggacagcaacaaaccatagaaaaagaatgttccagagcaatgcttctcaaactggactatgcatttgaaaccctgggaatattacaaaagaactgtgataccacagttcttggatagcgcatgaccagctgatgtgatgtcaacactgaacatcaagaaaacagcaaggactcagcacaagcgccagagccaagcactctgcctgaattcacagcccagctctgctacctatctggtgtgtgaccttgagctatttactagtctctatatctctttaccccaactgttttttctttataattttcttaaaattttaaacagataaataagacaggccctggaatctaaagagacagagtagctaaactgaacagcacctgatacaactcatgatgtgaggcacttgccctggaacttctactgtggaattcatactggaaatggagtttactccccctaccagactgtcttggtataattggcacacttctcccagatgaataaagcctcttgtaccttcccagaaatcctgtcccaagagaaccccatacctcatagttgtggggatttttgttttgatttttgtgttgtttgtttgtttgtttttgagacagtgtctcactctgtagccttggctggcctgaaacttcctatgtagaccaggctgggctggacctcaaaaaagatctgcttgccactacctcttcctgggattaaagacatgcgccaccacactgagctcatagtctgtgtttcaattaatctctagatttatgaagcagtcatcttatggtagcaaacatatatatattttaaaaagtcacattgttaaaatagaaaatgattacagacgttgaggggctaaataacttgtctaagccctcagatataatatataacaaagctagtctcttgactagcaggactacagaccaggtgtgttcactactcaactacagagctacaaccttaaagctagcaacgaggacacctctgcctagacatggaggtaatgttcaagagtagggcttagtccctagggaggaaatgaaaaaggaatcattatcatagctgtgttccagaatgagaaacaaagaaaattaagactctggagtcagaaaatgtgccaacaagcaaaggcacttgcttccaagctgattgaccagagtctctctagaatgcacatggtaacagaactctgacttccacttctgttgtagcttgtatgcaccatgacatacacacattcacatacacgtacaccctaaacaaaataaaataaattaaaaaaaaaacagagtttgatgttctcagaaagacagaagcttggaaaagattctgagcctaaaggtgaagtgctagggtcagcacttacgagcccatagccatgtgcctgaatctaaaagccataggatggagcaaggagggcttgcagaggctgggttagagccacgccaacagtctacactgtccacagtagctctgagaaactgggcagacacagactagaggaaagcactactctacctgtggggaacactggacctgcaactacactgtgttcttcaagaaaacactaaaacttgccttacatattctccatataagtacagacactttccagagggttattactatcatcatgcacaccaaactcaaaggaagctgtgtgtcggttcagagtcttttgccaatcccctctcaaagtcttacaatctgccatttgtcttgaatccttggaagaaactacttacagaaaaggccagatttacaagtggaagctgtgctgatgtaaattgcctattcctttactttcttacagatacatcttctctctaacctaactcttcccttattaaaaagtctcatcacagctgcaatgtcctaatcacgttcccttcccgaactctacccctctgtaggcaatcagaaatgattccactaagcccagaaccacatgctagtcagctctaacctcgccagcttctcactgccttccaaagggcatgttctagtgaaggagccacttcatgcatgccatcaagagcttaggctcaccatcgcccctgggcatccttgctctgcctctgtgccacaaggctgtcaccgcctgatgcaggaaatgatgtgtgaacataggttttctttgtttgttttgtttttcaagacagggtttctttgtgtagctttggtgcctgtcctggaactctgtctgtggaccaggctggcctcaaactcacagagatcagcctgcctctgcctctgcctctgcctccacagtgctcagattcgaggcttgcgccaccaccacccagccaaacatggggtttttactccatgctgggatccacacagcagcaacagcagctatttgccatagccgatttcctaattcaacaacacacagctacacttaggcaggccctttactatgcccagccatccatctactataatgccagcatcataaacatctttacagataaactaggaaatgtattcaagtggttatcactagacaagaacagagggagggattaaactttaacatcctgttttatacagttctgtactttctgaaatgtttttgacatatgcttgtatattccttattgtcaactacaaagtttttaatgaaaaaaatgaaagtgggtatgtacaaaaatagtcattacagtgaactctcaaggaggcagggaattggtaaagggaaaaataatttatagaaattgaaaacatctaaccaataaataaggctttcaaacaataaaccaagtattcctttaagataggtataaaatgttgacattttaaagatctacaatatatcaaaatgggttataaaacttcttgatttttaaaaagaaaatacatttcaaataagattagaagtactacaaatacaagtacgtttataaactatgaatgtggaacaaccagcttttgccatattcctcttcattcacttaattcaataaatcagtcattgatgaagatgtgtggattaccctttcacaaaacccttcccaacctgcagacaagtcatgtggggcaaatcccctccatggctttttagctttgggcctaaaacgtgaccatctagagggccaacctctacatgtaaaggcagactgattctccactcatggttagaagtagtcccacaacctggatgtcaaatgagggttggcctctttaagtactagttgtgatacagatgaactgaggggccaccggttctatccaaacataagattctctatgtccaacttgtgggaatgtccactccagggttatcttcattagtcatcaggtccaaaagattcgaatgccgcaaggaaggttcacctttcaaagctcagtctccaagatcatcagtccctgtgacacaaacaggtctacataagggggactgctgtatgacataaattccaacttactctgtggtcttcacattacaaagcattgcttcttcccctgttcctcatggtggcctgcctaggacacttgaagaccagagtagttaaagcgtcctaggcagaatgaaatcaagattacaggtagtctctgtatatccatgcgtctaaaaacagttggctcagaggcagaactgggcttagtttgaagtttctgttgcttaagatttaccctggaggccagaagtgagactgagtagagaccacttgcttagcattcataaagccctgggcttaatccccaggatagccaaaaaaataaataaaaataataagtactgtgtgactacactttacaacacagaaatacaaaaacctctaaaataacactttcaaaatccatcccctgtgtttattatgtctcatccaaagtgaaaacacaaatagcacagagtttttggttttttttgttttgttttaatctttgtcctaccattttaatttggcactcagaggcagaggcatgcagatctatgagttccacacaagccagaagtacatattgtaaggccctgtcccaaaaacaagagtattattaacaatacccagttgtgcctttattgaaaacttacttacatttaaagaattttattttcaaatgcctgtcttagcagttaatgtcacataaaaatgtgatttttattattattattattattattattattattattattattattattattattaaattgggtttagctctcataaaaagcatttttgaagccaagtggtaatggcagcacatgcctttaagacaagcactcaggaggcagaggcaggcatatctctgagttagaggttagcctgatctacagagtgagttccagaacagccagggctgttacacagagaaaccctgtctgggggagggacggggaagagttgggggtgattattccttaaagtttcagatttcaatacaaaacagccattagttatttaatgtatctatctggtgatctccagattccctttacaatactaaatcagaaatgcatgacttgactactaaacccaacattcatttcattatgtgtattaattaataatgtatgtgtctaataaataacagatttcatgtgagttactaatatcaaaagacaaaaacttaggccagtgaaggggctcatagggttatggtggccactaatacttattgcctgactttgattcccaggactcacatggtggaagaacagaacactcaacatttgtcatttaagctccataggtatgctgtgttgagtgtacacttctgtgcatgcacacgctcataaataaaaaaatgacaaaaaattaatgacaaaattagacttggaatcttgaaaaaaaggagaaggtagagaaatactaagtatgtttttaagaaccttgtccaattgaacaactgtctttaaatcactagagttttaataaacacacactgttttcatctagattatgaacaaaataatgtactctgaccatgttacattcccaaagagactgaggcagggaagtctactggatgggaaatcactacaaaaaaaaaaccatgaaggatgaagttcctgagagattggacaaggacaagcacatctgcgctgctggactcagggctcccagccaggtgtacccagccctgtaggtgtagagtctggcatattttcacaggttcttgagataattatgacatgagtgaaactgtaagaactcataaatattcctttctgtctctcaacaaaatcatcatgggtgtttatcatataaagaaaattatttgtgtgccttaaaattagctcgctgtttttgtgactggtccaaagttgatgtaaattggattagaaaacactacatggagttgggctgtgctttccctttgatatttctctgaacgaatgagaatgtgaaccatccttgccgagaatgcatctgaacttgctgaggctgggaagggtctccccaaaacatcctaagcaacaagttcctgcacccaggtcaagcagagaaaaaaaggaacaggtaactcactgtgacagctttgttaagtaattctctcatttaacctgccagtgcttgaacagacaataaatggtgtggctatgaaaactaaggaagtaaatgaaatacagctggctggcagcaagaccaaaccaagtgacaacagcaactttggtacaggatagcccagctgcagctgctgcagagcaggcacctcctgaaatccagtttgtttcttggaattactgtccccaacatgtacttacagttaaagcagcaatctattaaactgttctgttccattagtgtcataactatctcttccctattactatgaaattagaaaagtataatacaaatacttcatgtcccatgcatctcaatgacatgaaatatgctatcttccaggaaaaaaaaaaaaagaattgaggtgttttagaacatgaaaacaacacatttcgtttccttaccatcttgttagtcagttttctgttactgctaaaatacctgagttaaatcagcctaatggaggggaaaaaaggggcttactttgcttcacagtttgggaggttcccatcgcctctgttgctttgggctgtgatgaagcagcatcatggcaagggatatatgcagtgcatcaaagctgctcacctcaagatggcggaagcaaggagagagaggaggtagccagatcccaatggggggggggggggtacacaatcccagtgacttaacctcttctacttacccccaccatacctgaacagcacctgggcccctacagagagcaagccttcaacctgggccaatggagaaacatttaagacccaaactgtggtattttgggtttgacatgtgttctggaaagttttatttcatgtttgcactggctatcaggagacagtaatatcatcaccaagacaggagtaggctccctttccatcttctttagaatttcttttttctttctaatttatttagctaatttatttaggccacgtgccaaacggtaaagcaaatattaatgaagggaacaccttcttccttccgcaaagtaagtatcaaaataaggaaggggcctggtatggtagtgggtgtctgtaatccaagaactggggaggttgaagcaggaagattctgaattcaagaccagtttgggtattccgcacgctgtgcaggcacacacacgcacacgcacacaagcatgcacgcacaccttgtagagtagtattgttaatcttgccagagttcacttatcacagtgcagcccaaagatggagaaatgacagaatctttaggcatgtttcagaagctcatggtgcatgataaaacttaagaacagcaagataggtgaaacaacgctgtggcagaacttcctcttactgcagaagctcatggtggtttaatattaaatctgaataaactgggatcaaccctcaagaaaaggaagatgtcagaacccaaaggacacaatttagtattcctgagctgaaaaggtctttcttcacaagcatttaaactgaggcacacaactattcagaggttagactaaattcatacagggggctactggcaacagtgtgccaggcatctggctgtgaaaactgacaaaatgtcaccagttgccctgtcttgaacaccaacacagtaacagaacacttctgaggaaggctttggtgcacctacagaaaatctcgtaacagcactctgggtaacaactattctcattaaatgtaacccccgccattacatgatttctatagatctcttctcacagcaggctctgaaaaaataccagctggccagatgtcacgcccaagacagatgtctgggactctgatttttcccgagaccaggtccttactctgtagccaagctgtccaggaactcactctgttgcccaggttggccgggagttctacctcggtcctttgagcactaggatggacaggtgtatgctctcatgcccagctaaatagtttacggtgagattgacattttacaccttggtagcacagaatattcaaatcacagcacctgtgccaaagtaagagggagtggagaggtttctcagaacctttactccattccatactaaggcacagaacaacaaatggggaagctatgtaactgcacttaagcatccatatacataacaatatactttctattcatatataataaattggaagaaaagaaaatttggtagaccacaaacttggctcagtaattttagaagactaaaagttttactagtataaaaataaaaagttaaaaagtatttaatttgcccacttcaaatcacttgacagataaatttacaaattaatttaaatctactttatagattataaacttttaaattcatagcacattaaatttaaacttctcagccaggtgtggtggcgcacatgcaatcccagcactcagagaaggggggggggggcatgggaaagcaggaggattaggagttgaagatcattctcagaaagcaagtttgagtccagcctggtaggttacctaagaccctatctaggggggagggcgggggaagagggagggagggcaagccaggagacttaaaggatgttatagcctagtgtaaaacattcaggggcattctggcttttagattaactctgaatctaacaagctgataacatgtgcttccatccataacctagatgttacatctgttcctctgaggatggaccctaccatgttcagtgtgtccaggaataaagattatccacaataatgaaaatgcttcatgtaaagcttatttttttcatttcttaggatagttttttaatgttatctttatatttaatattaataatatgtatattaagtacttatttgccagtcttcattctaaagtttgataaattaacaaatttaaccctcccaggcactttttaaaatttttttctcattttatatagaaattctgtgtgattccttcttgcatttattaggtccaaaatttgctggtgggaatttaaagtcccaaccttccagctgtcaaactaccagccccactcatgtatgctacaaaatctagtttccgtcctcatgtcaccagtgaggaaagaactggggaaagtagtttcaattctagaaggttagtatctgcccacaccaccctatagcttctggtgccttacatcggaggagaccctggtgaccctggcttagtgctcctcaggattttctcagcattcaaactcgtcacctcagcctccctttaatggagaccagagaaccccaagaagaatcaaaagggaaaatatgttcccatacaactctcacccaggtgaaggatcaaggtggaggaacccatctctgcatcatatattcaatagtgagaagagcccctcatctgcacagctgggtcccaggagtatactatctccttccttaattacaatgggtgggagagttatgtaacacttgaattgtaccataggaatttcattaaacaggaaaatgacacatatcaagggagatatcatttatgctgattttgaaacaggaatgtgatgcagtgacctggatggataaggaaagacacagttaccactcataccaagtactgttggaaacagggttgtgtgctgtggaataatcctctgtacactgaaaatgtgttgctctcattgttaataaaaagctgattggctgataactaggcaggattttcagggcagagagaatgctgagaagaaggggggaatctccagagagccacaagcagacacagaaagaaggtaccacatggcaaagtgcagataagaaataggagttaacttataatgtaagagttagctagtaaccagcccgagctatcggtggagcatttataatcaacaataagtctctgggtggttatttgggaacagctaccaagacacaaagaaaatctgcctacaattgtggatgaagatgaaagcttaattatctacttgaaggtacaaatggaaacaatgataaaaattaatgctgatagtataaaataaaataggtaataataataatattcacaacagatgactattgtatctgcccctaatggcatgcaacctgtaactacatacagacagaaatgcaatggctcttgcatgtgtgctcttgcatagggatggccaaaattaggtcagattcagaaacagtggggttttatagataacctgagtgaaacaagggctacttggaggttctaaggaagccaatcttagtcactagcatctttaggatgaagtgggaacagtttagcctggacctgctatagggaggagactgagctcagaaaccaagagcaaccaaaagaagagaagcagaaaatttaggcagttacttgtcaatgtttctacaggcatggtgcctattatgacccatgcatctttgtgcaatttacatggtacggtatctcacagagaaaacacatttcacatggtgaacatttcattacaagatcagatatcactagtctatggctacctttaaatatttataaaacaaattgcctttacaaaggcagtctaggttaattaacatttctgaacatctatccctcatctttctaacagtaataaaaagacactaactggttaagaaggttgaaacacaaatccagtattagtatggttcctagaacatagtaaattatcaaccaatactggttactactactttttattaattctcaaaatctctttatggtctagatcagtggttttcaaccttcctaatgatgcaaccctttaatacagtttcttgccaggcagtggtggcacatgcctttaatcctagcactcgcgaggcagaggctggcagatctctgtgagttcagaggccagcctggtctacagagaaagttccaggccaagctccaaagcaatacagagaaaccctgtctcaaaatatatataatatataatatatatgtgatatatatattatatatatatacagtttctcatgttgtaatgaccaccaaccataaaaattacctcattgctacttcataaatataattgtgtcactgtcatgaagcatagtgtaaatatctgatatgtgccccttgtggggattgtgacccaatggttgagaattggtctagatcttcaaattatgactagatctgattttctcactatgtccttctgtaatacaaagagaatagagattagctttaaaattgactaaacataactaaaaagcacatccatagccccaagtcacaaagtacactgctgaaaggacaataggtgactttcagattgtataatattacaaattactttgacctatttactaaagtggaaaaattatgatttcctttggaggttagggagttgacaaaatacaagaattattaatgtaagaataattatatgtaaaactaagaaaaaacttgtaaggaaccaacttaggtgaaaatatttgctaaggttagaaatgtaaattttaatgagtaaccatttttttggccccctactgtaagtcccaatctaaggtctttaacaactaggcaagtgaggcaaatgtaagaagccatagatgcagtgcagtacagcaggaagctatgaggacagtggccagttaaatccagtacagaggagaaaaaagcagcagctatgggggggggggggagtatgcatacacactgtcctggctagtttatcatcaacttgacacaaattggggttacttaggaaaggggacttccaattgagaaaatgtgtccatgagatttacctgtaatcaagtctgtgttacatgttctttccttttctcttcttttggaaggaggggtgggatgctggggtttgagacagggtttctctgcgtagccctggttgtcctggaactcactctgtagatcaggttggcctcaaactcacatagatccacctgctctgcatccagagttcttggagtgatatgagaggccccaacccattgtgtgtagtgacacccctgggcaggtggtggtacagggtgaataagaaagcaggctgaggcccccaaactgatagctaggaaaccagcataggactgatccagacccatgaacgtgggtgtcagtgagaaggccttggaaatctgtgggacctctggtagtagatcagtacttatccctagtatgcaaatggactttgggagcccattccacatagagggatactctctcagcctagacacacgggggagggtccaggccctgctccaaatgctatgacagactttgaagattctcccatttaaggcctcaccttccctgggaagcagaaaggggatgggataggaggttcgtgggggggtggggtgaggggaggaggggaggaagaactgggattgacatgtaaagcaagcttgtttctaattaaatttaaaaaaaaaagaaagaaagaaaagaaaagaaagcaggctgagcaggaggagcaagccagtaagcagcacttctcaatgacctctgctttagttcctgccctgacttctctcaataatggactgttacctggaaatgtaagcattatccctttcctagtagagttactttttctcactgtgttttatcacagcactagaaacataattaacacactcagagtaatttcagtgcaaccccctctccccttgcctagctcagaagtattccaatcatcgatactcagtgcttaatgaaaaaaaatgaggactttattgtgcatgtaatgtaagccttagtgtcactgttcctcaaaggtgcaatatacttcagaggtatgatgtacaaatgcctacgttagaaccatactgtgctggtttgacacagctaaaatcattggagaagagggagccttaactcagaaaatgcctctgtaaacttgggttttaggcaaacctgtaggacattttcttaattaggattggtgtgaacaggcccaaaccactgtggatagggccatctctggcctggtggtcctgggttctgtaagaaagcaggctgagtaagctgtgaagagcaaaccaataagcagcactcctccatggcctcagcttcagctcctgcctccaggttccttccctgacttacttgaatgatggaataagatactgaagtgtacgccaaatacaataaacccttgcctctccaacttgcttttggtcaaggtgtttcaccagcaataagaaccataatgcatacagagacagaatctcaaagagctcaatggctaagaagctccccggatagtgattatgcacacattagtaaaacaccctcctctttgtttttggttgtgagcctagcctttaacagctgagccatctctccagcccccctcctcactattaacaataaatttcactccatcaaatttgttgctgtattgtctccaagcctcttgccttattcaaatctcccatttcattctataataaaacattttctttccctctattatgagctaataatacaaagtatcattgggggttttatcatgactcaaatctcattttctatatacaacttgcatgtaaaatctgtgttaagtatgtgttcaacaaaatctccataaaacacaaatctttggatgaaaacagcaactcaagatttacagagacagctctgtgaataagtttttttattctaccatttgtaaatcttaatgtctatgaaaataagcttttcaggaaatacctcatgtcagttttaaatactattatcaaaacagtatggtacagtatatttctttcattccattcactgacaaacaccttattgttttatttctataatactgataatcactgatttttttcctcttcctatgttgcacagtatttagtacttcaaaactattcaaagccaagtatttttaaaatgccagaagtctccatataaatgttgacagatctacctatctgccaataggctttctttcaataaattttgtgaagtaaggaagtaaagattcagactaaagaagcagtgaacttctgccaccagccagaaagcactctaactgtggacatgtaagaggccccagatacttttccacactgcacacttcattgatgaaccaggacctggcccagacagagaaggttctctgcaaagtgagtggtagtaaatgcggagactcatgactgttcaagatgcttagaataaatgagaacttagtatttgacataaaacaaggtatttatacaaccccttctatggctagaaatactgtggaaaagagagcagaaagaatgtaagagtcaaaggacagaagggacacaaaatgctgtattcaaggcatgacacaaccataacgaacgcacagcagctgtgattgcctgcagtagaccaacaagagtctgtgtcaacagccaatcatgaatcttggaggggctaatgagaccacacacaacccctgctgaactattggcaacttctttagaccatacaaagcaaagaagcaaactgcaacacagataaactttatagtaagccaagagatcccaacacagaaaaaaacataaactgtatgattttgtttacatgaaaagtccagagcaatcaaatcaattgaccatttagggaaaagcaggaagaaaggggtgtggctgctaatgtgagatgtctctgtaggataataacattccaaatgttgttaacagtgacggctgaacaattcttatgaacttaccaaacagtgaattgtgtactacaattacattttgaaattctatagttagtataactggaaagttttaaacttttaaatggtgatataaattacatctccatctaaataataagaaaccaaaactatagaaaagcataaacaaagatatcaaagatgttatttacttagtatgacaaactttagaactaattcagatgaaattaagttccagaagctaaatgaaccactaaattcaaaaggttacttatacttctctttcatcattaaaggagtagaaaactaaagtcttcctttaagtattttccacttcttaaccaaatgataataaatgtgtcatgatgcataagtgttcctttgccgtagggttcctttactcttggactacaaagtctatctggaacaatctgatagcaaagagaaaaagtcatttaaatcaggctattagatggggcagtgacattcgatgtagttaatgtatttcccagacactatctcagtgcttcccatttcccaatcaacaacaccgctccaatctaataggtctggccatcagatgcaattggcttccaattacatttcattctgaattaatcttcataagtgtaccaaagcaaagcaaagacaatactgattgccaaagcagaggcactaatatgccgggccagtttcttaaagagaactcagggagagctcccaagcctacattccatgggcagagtaatctctctaagcctgggggtttatgagaaatcaccttctatgggcaagtcgcctatgcttccagggtacctggggaagtgacgcaaccaacaaacatgcctacatcagtcaacgggctctaatggattgtgccttgctccctggcaacatgttactgcactccatgtggagatgttttctaaaaatcacgggagcactgtactttctcacagaagaaatgaatgtctatttgctccctgaagctcactgatggtctgcatcatcatctaggtcggactcagaactcagccaagcagtcggtgcagtctcattccactctgcccttgctacctgtaggtgtgaaacaaaactgtggctctcttgatgatgtcatactcctgtgattccttaattcccaaactcatccaaattaccatgcagggccctgatgcaacagtttaagaatttctgctggactcaaggttaatgcaaccatcaaagcttccaagttaaacttaaggagcagcctgtttaccacccagacatgcttcctatacaactagtccggtgtacccacagatttaccacttgacactgaattaaaaaaattaagaccaatgtgcaaacagaaggtcataaaatgttgacacctgtgaggccatagctgaaatgtatgatctaaaatttagataaatcataaaagattatagtaatgcatataaaatatatattattctaacatatatttatatagatgtatacactttgagtttgctgtgggttttaataatttaagtttttcaggccacccagcagaatagattttgatggtataaacaacactggaaaacagcccagcttactttctagtcatatcacagtacaacactaaagatctttcagaaaataggaggcagctcttttacaggatcacattcatctcttcatcaagcaaacactaagggcctacaaagcaaaagcaaaaggagtgctttcttaatcgaagacatgtattctacaggtgcagaaacatagcacccatttctctatatcattttcaagttcttcatgaatttcatgagcttaaggtttgaactttgctattaaaaactgactccttctgtctactctctttatttacctactgccaccctcatcaactctgccctgggcacactattctcacccactctgacacagtgttaaaaaaaaaaaaataccaaatgccacaggcaagctgggtgaggaagtgcatactgtgatcccagcaagtgggaggttgaggtgggagaactgtaagttccaggctactcttagctatataatgaagcaagccctgcctcaaaatccaaaaacaaaccacaaagccaagtgcacacactactacaagaagcgcctagacagcagtgtttgccacagttaaacctcagaggaatggcagttgccctctccccattttactccgatgcccttaaatacatctctaaaaacaaaaattgtggtttggcacacaaaagaagacaaggagctagaaaaaggtctcagtggttggagcacaggctcggttcggttcccagcatccacgtggttgctcacagccatctgggatcagatggcctcgtccgacaccagcacatatgcacatggtacacttgatatacattcagggaactctggtacccttaaaaaattttttttaaagaaaagaaataaaatgggagccatgttctagctctgagctcgtcctcttccctactcatccgtaccttaccacaaattgttttgaaacatccacagcccaatcccaggggaaagctaaaaacaggtgatcaattaattgctcagtcttatctttggacttagcacatttgctgtattctttgagcattcatatatgctagaatgtgctagcatacagtttctttaaaatgtcatgccccaggattttcatatgccagtgactgccttgttcaaggaaaagtgtctacaatcctgtacacaatcttcatctatctggtctctacccatgctcatatatgtgtttattcaagagaaactggatttttattttattttaatttagttaagacatggagtgttacatgtgtctggtagctgccacatgagaaatttagacagaaaagttctgaaagtggaacaagcagcaaaatcccatctcagccaccaccacctatcaacccactgaccttcagttaagtcatttaagctaactcccatctccacaagcgaaaactggcatacttagttatggaactaaaactaaatatggcaaaacataccaaacccccttcttcccaccttagttcccttgtcaatagcatcctaggttagaagataaaatgacaaccaactaaccaaaaccttgaaagttaaataccaagttgcaaatggcagttgcttctaaaaagtgaagttgaaattttccatcttcattttatatacttgtatattacctaaactttttctcatacataggaaaatttcagtttggattttaaaaactgaagaagtgtaaaggttctccaaacttgccctcttcttcctggtattatttaacagagcagacaacataatcttagccggcacaagacaggagtgaggaagcagtgacccatgacaagccctgagaccacacttcaaacagcctaagtaaaacacaggtagattaaccttgtgaacgtcagtgagcctcacttgggtttctcttgcctatcccagggaaacagtcctcctatggtctcaggctaaactatcatcgggctattttcctcaagaaatcagtctacaggatcactcaacattttacagtaaagcaaaatgaaaaaattagtggtgagctggttagctggttaaataattacatatttacaaaatgaaatattatgtagctcacaatacaaatttattagaaaactatttaaaataatacatatttgcttaaaaggggggggggaatagacaaacaccagaatggtggttttgttttctggggttctgttttgttttgttagtattttgagaaaggatttctttgtgtagcccagaaatttaatgtaattaaaaagtaaactgaataaataaatagtaaatgccgtgcctctctcgaacccatgtacatgaagctaataaagtccagagtgtcctaaagcttctactttcaggtagaatggaggcagtctcaccaaattcaggaccaaataaagccttacaaagttttagtcaaagtaactttaatatgagaaggcaaaaatgctatcatacaagagttaaggtaaaagaggcaaacattagaagtaacagactactattactcaggaatgatagattgcctttttttaaggaaagaactgaaaattggtacagagacagagaggtacaaaccactgtacaaagtaaatcctaaagtaggtaggagggatacagcagtgaataaagaccacaacacagcttataatctaatgcagaattaaagaaaagtagaactttctcgtgttcttttttggtttctatccacaacacaagaaatacaggtaatgttaggtcccattctcaagcaattcaaaaaccagattcataaattcacttatgtataaaaatcaatttcagaatagtgctttcaccacagaagtcaaaagcaaatctaaaatgtctaaaaataaatttaacaggaaatgtttaagacctgtataaataaaaccataaaatttcacttactgtggttaaaaaaagaaagtgtttttaaaaagtagagaaaagacttgccacaacacaccacacaccaataaacacacacacacacacacacacacacacacacacacacacacactacaccccaccccacccccaccttcctcaactatcaagatgctattaatctatatacttagaataatctatattagtagaattaatctatatactttgcacaatcacactcaaaatatcaatagggattattttctaggagttgacaaatgattctaaatttcatgtggagaatatatgagtcagaatggacaagaatttttctataaagagaatgtgaaatgaactgctcctgcaggtgatgcttttatacatgcaacccagaggaggtcagagacctggccttcctaccaggcccccatcatcccccaaaggtcagggcaggtcctcatctctgctgacgactcacttcagagcaaatagtccccaaaaggagacttactgtgtataagcaatggatgccaatgcaaagaggaacaattcattaagggatcaaagatactaagactccagtcccctgtttgatgggatcatggtggaggggacgtgacaaaatgaatgttacctccttggctttcatgctcagtactcagttttagattccatggaaacctaatcaataatatatggcagttacatttgcatttcacttggttttttgtttgtttgtatgctttgttttgttttgattttcgaaacagggtttctctgtgtagctttggagcctgtcctggcactcgctctggagaccaggctggcctcgaactcacagagacccgcctgcctctgcctcctgagtgctgggattaaaggtgtgtgccaacgcccagctcatttcacttggttattaatagaactttaatacagtatttatgaacccaatcttatttccccagtgcttcccaagtggctgaaaactcagcacacacccagaatgagaagctatagattcaaaccagagaccaggagagctgtaagtaaggctgggtctgaaacagccctcccattgcccctctaattaagtccaaagtgtcctagggttttgagcttctatcctgtgagtacagtcagttatattctgttctgaacttgcaggacactaacccaaacctgaccagagagctctagagataaaatgtaaaataaaataacacctcatgcttaccatgtgccagacattgttccaagagttttaaagagcccactcactatgctcttaggcactagtacaaccatacccaagtgacagatggcaaaactgagacacagaacggcccctaacttcctcaagaccctgaggaacatgaggaagagagctcaggacttgtgcttcagttgggatgaggctgcctagtgccacatctgcttacatagatcacatctatgtatacccctaggccagaggattctctgtgatgatgaaacacacatatgatggctcaacctaagttactcatagtgagccttaatgaatataaattacaagctaattgctctagtctctcatagtaactcataaaagaactcaggagtccgactacacctatcttcatggccctttgcttcagaggaaaacattcttctacagtgtacaggataatcacactaaaggcatagtctcatatgatagaaggaccagcatctgtaagtcttgctgcccgctgtgtcatcctctctctcaaacaatacagccttgcccagctggtgcttcagaatccacccatagaattttgcaatgtatttgtatataggttgctcactgcattttctagtaactaaagattatgtaactatgataaaattttgtattatgccaaacaaaaatcatttaagtactgtaaacaaacctaagagaatcacacttaaaccattttgataattacattcctgttagtagcaataaaaggaaattctaattgtcactgtcagcccaggaacttggtctacacaagagacttttttaaagttctgaacaggagttttaaatttttcaattactgtataacatttaaaatacaagatttcacattaaagagaactgcttgttttataggacagcctactctctacacacatccaaagctcaacaacagcttcagccctacccagacagtgtcatgaattaaaattgcctgcccgaatctcagaggcatttgactttacaagctctggactaaatcaattcctgatagagaacacacagatacagtcactagagagaatttttcagctacttgagcatcctctttaaccttcttttatctcaaaaaatggggggtttatttgtttgcttgttaaataggtcagagagaaaaagggaaacactggataaatttttgtttgtaaactcttaagccataccgcttccttgagccactggcacgaagccaatggtgccaagggtcctttcctgccctgaccctatcactgcactgaacatccaaaaccacacagaccaaatctaaaggcaaaaatgatataaccaagtcatctctaatggttcgcctcataccctctatgactggactcttcctttatcccccacctggaggcgccatgaacacaactatgcttgcttcccaaggtcaaaccaaaaccaagtttcttttgaaaaacaactgctgtagtcattgtttaacatacaggcatttagaatgttcatacagaaaagtctagatttcccgtttcaggaagttcctgggaggaagtcagttccccaaagctcagccactcctcagaccagagaaaacaaaggcagaacaggccttcactctccagaaggatccagcatttcagaacaggaaacaggatcctgaggaggcaggagcttgagcctgagtgcagagctagtggaagagcttgctttattcacatgctccaagaagagttacggattattttgttattgttgtttattttcttgtatctaaagattattaaagcactctgatcaggttccaatcatgaaccttttgaagcccaaacgaaacgttaatataagctatttgtcatcccagcccaatttagctttgtcttaagtctttggaaactaaaaccctccatctatggtaattgtagtctagtaatagttacgatacaacattacttcttgaaaaattattcctgatactgtgaatctagaattggcaaaacacttttttcatacactgttctttctgtctttctccctctctttctctccctccccccccccttttctttcttttttaaagatggagtttctctgtgtatccctacctctcctggaattcactctgtagaccaggctggtcttgaactcacagagatgtacctgcctctgcctcccaagaactaggattacaggcatgcaccaccacacctgacttcatacactattttttaagtaatgcatgtaaagttaagttattgcatgtaaagttaagttctcccaaagagaaccaatgtagtaagtggaaggtcagcatccttcgccctcattctcatttccactccttccgtcattattggcttcagtgtctttctctgctcatcagcttagtaagaggcttacacctttggaccacaacctctgacagaaccactgactcactgcctccctgtactgaactcattcacacttcccctccaattcataccaagttttatttgattgtactatttttaggtcttcaattggttagctgttgctcatttcaacagcattacctagtagtacacctggacacctcaagataaaagaaaaggaaattagaatcttcacaaatgtcccatatactacttgtcatcctcctaaactccactatagctctaattaccctccaccctctccatattatcaggtttaaaacactgagatattcagatgggggggtagaattatagttgtcttttgacacaaacagcaaactatctagcttcattttcagtatcacaatgacgtaaatattgcacagccaaacagcaatgtttaacttctagagaaagaaacacaattttacaacagtgaacttggttcaatcagtcaataggacgccttccttactctccactaaatgctcaaaattataccgtactttgggttttctttattctcattttgggaaatagaaaacatgaagcaactatttgatatccagctgcactcattttactcataatatctcagtattatttggtatccactgcacctgcactagtcatatggtctcggtactatttgatatccacctgtactagttatgctcacattatcttagtactatttggtattcacctgtacagtcatattaactcagtactatttgggatccacctgtcctccctatactccattatctcagtattatttggtgttcctctttttccagtaaagaagtacatattactccacaggataaggaatagttaataggctaaacaataaaaagaacctcttaagtccacaagttccaaggcatgtgcctgagtgacaggaagacatcatcaggtaaagatccagctcttagctagactggtctttttatcatctcaactacccgatttctaatttccatttgcttaaagctacatccacatagaaacaaagtactctcaagcaggagtgtgtgtgtgtgtgtgtgtgtgtgtgtgtgtgtgtgtgtgtgtgtgtgtgtgtggcgcgcgcgcgcacacacacacacacacacacacacacacacacacacacacacacacgttaaaattacggatttagtgacgttgcaaaacagaataggttacaactcctagcaaagagaaaagttatttgtccatggaattaagttggtttatgaaataagcattacagaagaaactacacaagacaaagagcactggtacagatagaacaatgctaaatttaaccctggctacatgttgctctttgtggtatgactttgggccctagcagttgttactggaaatctctggacctctgtttcccaatctgttcaaaaggtacaccacctcctttgttgggacactataaagacaaaatgaggtaacaaatacaaagctaccattatagtcttaagcactcaataaattagtgctaaaaaaaatcacatcttacatttatggaatcagtgtctcaaaaattagttattacaacacagattaggcataaaggacttaattcacattctatacacaaattaaaattgaatcacaaaactaaagacgacagggaagacaagatgtactactacacaaaaattgttttatgtataatgctactacaaaattgttctaaaaacaaaccctggaaaattatgattcctgagcttaaaaaaaaaaaaaaaacaatgcccttctatgatgatgatatactctcctggtatgatattttgaaaacctaacacagagaatacatctgaccaaaaggattaaaaattacacacacattgctttactagtttaaagagattccaaattcagtttgtctaaacttataattttaaaacacaagaaaaacttttttcatgaatcaatctataagctagattcacaaaaccaagtgcagaattctagaaaagtatcactcccacactttacacacatttaagaagcatgcatagaaatgcagtgatgttaaaacttcttccccaaaccacaaagcagtattgcaagctccacccttgttatatgagctagaatctaaacatctggtctgtgcatatcatggatactttgtgaactgcctttctagcagttttttctagaattgctgtcttcagtgtacagcatgattttaactgaatgtttctatttaatattttcttcttatagaagagaccatgcccttttgtaggacatgttttaataaatgttacctgtccattttgtacaaaaaaaaaaaaaaaatctggtcttcagtttgctccctcctgcttacttcatcctatactagtgacttagacttggtgatttctaaacaaaaagatgtatctgagttcctaaatacttagctcctatttgaaagtgaatggtaaggtattcagatctagcccattctttaaaaatgcaattttccctatttgtttttattagtatacaatattattaagcattcctctccctccccgccccccactgcataggcctttcccagcttctccataaggttggcactaaatgggatttgtgttctactcagtgccaatattctgccacgtaacagtatttcctgtcatcagtaaagccaaaaggaaactactgggctttctacaatgctctcttggctggggattgtactcagtgtacaatctgcaagtagcacaaatgaggccctccgttcagttccagaaacaaaaaccgtaataaatgttctttctgttcatcatcaaagaagacgggaaggagaaagaaaatgagtccttttgtttgtggtgatgataatcccacctaattaggaaattcactcccgagtgcaagctactggcaattcaaagacactgaatccaagatccagtcacacagaagatggagatggccaccatgctcggggaaagtcaaagtggtgagtggatatgaggcgcagaagcagcatttcctgtgaactagctatgcctcagatgcgcattctgatctgtgtacagctgagtgctcactgggctggaataactttaatgactgcaccctatttgttaacctcatctcatcaatttcatttctctcattccatggtcatttctcatctccccacattgaagggtgtcactcatttctcaccaatgtactcatcagatgttcatcattgttctaaagatctgggctgtcaatcactgctccaatctcaatccactttcatatcactaatctgtgatgatattttgtttatgatctaacaaataaagcttgtctgaagatcagagtgcaaagctagccacagtagtcagccctacagtccaggcaatgggggtacacacctttaatcccagcagctacactaattgtccagagaggctggatggtggcaatatacacctttaatcccggcactagagaggaatataagaatttggagacaggagctcagggtttcagtctgtattcagtctacagttatgctgaggacaggatcaccctttcagtctgagataaaggtgagagctgtctagtggccagctgttttgcttctctgatcttcaatttcaaccacaatatctgtctgtatttatattatttgtgctactctaatcatatgccaatgcctaagaatatctacatacaaactattaaccatggctcttaacaaccaatagacttatgatatctgaggccagtgtatgcttctgtgcttagctacctgggaaggtctcttggtatatgattcaggttgccacagggaggctgggtctaagtttacagatttttggccagcctacagttaactcccagcactgaaagaacacacaacctctaggaagggtggctgtcaggatgccaagaacaatcttgaaggcaggggcaactcaatcaagttggttactagccagtcctgggacagtgtttctgaatcttgactgaactaccgctttagctgatctataatgaaggtcccgcagagctcacagcagaaccagcaaatttcttagttagaagactgcaagaggaataactcactgtcttttcattttctttagaactctttcacaaacagatcagacatccttgccttaaaaatccttaaaatcttaaaacccgacagcagtaccacagtacctggctcaaccaaaggccttgcacatgctagataagcatgccatcctggtcattaaaacacctttcaaaatgtgaaaaacatttccttcctgtttttcttcagcttcacagctatacatttgtcccatggagaacagaaaggtaaactgccagttctattctaaaaggggagttcaaaagctgaagggaaagaaatgaaaacaaaaaaacatctacagtcactttcagatcatattaccaagagccatggctctgaattgagctatgcacacttctgattttctccaccagggaaatattgtacataatgtacaaatgtggtggttcatggtcagtatggaatcccaggacctgtggaaacaaagccacagttctctcatcctattgccatcacagagttctgaaacagggtttgatcccagaatagaagcatccctgttcatttggaacaggtactctgacacggcggtttgttctatactttgagaaactgctttacatggcagagagcagagccaggaagagccagtcactccacattccactcaataactaaggaaccacattccgctaatggagaactcagaggagacaaacacatgaagatgctggtgtgtggtagagaaatggagacatctaacatggacagattcctctgaaaaggctttcaagaggccagtaggtttttgcatccattcagtttccatcggtagaaacggcaccacacttataatggaagaaaatgaagaaactcagcagtttgtgctcatattccacaagagagaactgtaatatacaacttgactattccaaactcttagtaatatacgaagtgatgccctacagcatgaagggtgctgtcaaccacgtgctgctacatcagcagacccaaacaactgtattcaagttagaagaacttacttttcttgatacacacaaggcttttccccttgttgttgtcgaaatttgactttatatagacttactaatgtgaagcaaccaaaacaaaaacacttcaccaaaaggtaaaattcatctctactgttgctacttcccagaattcctagtattactacagtttgaagccaccatcagtatctgctgattctttagccattgagactacaattagcaccacccttcccttgtcacgcatcggctgctagattccctggtcacaagctgttgtgtacgggcttcccatccaacagaacagtcttgtgctaagcaacaagattaacagaacagaaatggtcactctctttctaagtaacctttgaatctactgaatgtcagaacagtgtgcatgctcatgcagagtctttttttattttattttattcttttattagttcaaattaggaacaagcttgcttcacatgtcaatcccttctccctctccctcccctccccccaacatcccacctgcccctagccatcccccctccacaccccaggcaggtaaggccctcaaaagaggcccccaaagtctaccacatcatcctgggccaggcctaggcccttccccatgtgtccaggtgaagagagcatcccttctttttttttttttttaagaacttacatatttaatacagtgtgttacccctgtacaaacggaaaaaaattaagttcaacatttctagaccaatattagctgttaatttttatataatgccaactcaacacggtaaactgggatactttttttcaaagttgacagcacagctaaagtttctaaaaattcaaattatatatatatatatatatatatatatatatatatatatatagaccaataatggcagtatgttatgcatcaatagcagcaacagcttttcaaggttctgcagtcatttgaacaaaattgtagagacatacagctcactccatttaaaaaaaaataaaataaaataaagtaaaaaacaaaatcccagaaaacagcagagttctgttattcttgtggtacctggcaccatttttttttttttaaattagcttctcaatcatcatctggaatgaaactattctgagcaacatcattaaaaacagctctgataaagcacggtctctactatgtatcataaagcaggtccacatatgagtgagtacataacatgtttgtcattttgtgattgggttatcttgctcagaatggtttcttcgagttccatccattttcctgcaaatttcaagattccattgtttttttttctgctgagtagtactccactgtgtaaatgtaccacattttctctatccattcttcagttgaggggcatctaggctgggaggctgtgagagctgctaatggaaccacaagataaagtaggagacttcagacagcccgcctgccacttttctttctcccattatctgtggtgccttctctttctcttaaaagttttgaatatggattgctcatctgtggcttttgagacagcctgtgacaacagtcttgctatgtagctcaggctagccttgaacgaatcctcctgccaccttcaccatcatcctcagttttaaactgcactttaactttttgtgtatgtgtattagtaaaggacaagatagagtgaacagcacttaaaacaatattaagtagaaacttgaagtctagttctccagtgaaagatgcaaacatatagttctctcaaagcactgctatcatgcacaccttcttgtctgggctgaaatctgagggccacttattcttccttgcagatctattctttgtctgttaccaggatattggggcaaccaaacactacaattccataggcagctttgtctctgtaacactggaattatcatctgcaagtagcaccccctaggtctgtacaatcactagtcacggtggccttgaggcgtgaccatcaaagactttgaaatgctaaaagtcaggctggaaagggcttctgtagttgaaaataaacataattcttatgtcttaaagaatatcagagtaacaaagtctaaataaaactagaaattctgacgtacttttttgatgacatggaaggactgaacaccagtaatctgacagaagcatgtaaaagatttttaagggagtagcacaatatccttgtaaatctctcttagcagaccacctgcctgaacatacagccagagtcctaacccatgtactagtaacaatcactccttcatctaccaacagcatttactaagcccctatgatgggagatgtcattctgtaaatatgtcttcttggttggtaaatacaacactgttggccaataaggcagcaagataggtgggaccaggatatgaggaggattctgagaagtataggtagagagggatcgtcatgtgatcccaggaagtgatatagctgggaagaaactagcactagctatccatagaggtctggaggtctgtacagacaggcaggaagtgacatagctgggcagaatcagaaaataagcagggacaaacaggaaatcactcttcttctctcttctctgcagagacgctgaacagtctaggtgtaggtcaccagagtagtacgaggtccctggacctttctccggtaaaataaggccacgaggaaatacatagattagtagttatgggttaataattaagtcagagctagcctataagaaaccatagccaatggccaacagcttcataattgatataagtcttctgtgttcatttggggctgaagctaggcggggcctaggcgggccagaaagctctcataacacccctagactgggaaactaggtaaagtagttcatcctacaaggatatgtttcaagaccccctagtgcacacctaaaactgtagacaaaacttacatgtgctgttgagttgtccaataagtaaatatgtaggataaagtttaatttttgctaaacacaataagagataaacagtaaatgataacaaaatagaatgattataaaagtatattaaaataagttatttaagacttatgaattgtttattattggaattttccatataatattttaaagctatagttgacttgattgtgaataatagaaataaaaatcaaaagtaaaacctgagatttataaagcaggctactgttcctgggatctagtaatccacaaaaaagataaaacttctcgggaacctcaaagagggaggaaacaggcatcaggcaaacaactgtatggggtataaaacaccaaaaagacctaggaagaaaactctttaaagcgactagtgaagttttcactgagacacccaagcagagtcatcaaagagatcaaacagtgaataaactgattcatggtggggggaagccatctacggcaggcaggcatggctcagactccctgagctaaacaggctgaggggcttaaagaacttcaggagggttggaacagagagaagtcaaggcagggaaaaacagatggagacaatgtcagagtaggaagctcaacagagaacacaagcagccacctagcaccacctttagcttctactctcatagtgcaaatgataaatgactactattacaagaggaaattattacagaccctaatgctgtaccaaaaaaatcaaatgccacagggctgaggatatgactcaatggtagaacatgagcttagcatgtaaggggccctggattcaactcccagcactgaaaaagaattcacgttacaaatgaagacacaacacagtagtatctttactcatttcaactgccaaaccatccatagagaggagacccgccaaagtatagtaagatatcctcaaggttggtgctagtctgaatgcccccactttgctttgctcttacttcatgagactcagcaagggtggcagtgtatgttctaagaacatcaaagacacttcctggctatgggcttagagtactttttgttttgttttgttttttttgtttttttgtttttcaagacagggtttctctgtggagctttagagcctatcctggcactcaatctcaactctacagagaccatataagaattcctggataacggctctgcttggggttgtaaattttaaagttttattaacaaaatacattttgctttcttaaaactggagtatgttgattttttttaaagtaaacctgaaggaggcctgggatgggcaggtcagtggtagagttcttgcctacaatgcctgggttacatccccagcattacaaaaactaaaagtgaactttttagtttttgtaatgaaatgggatattttagttttttaaggaaatggggtatttcatttgatagacacatgtatcatttacaaaaacaggtacaagtgcctctgggcacctaccaaacacacactctcttactacttgttaatggagcccgcctgcttagggcaccccaccctctcctccacaccttcagcaatgaattgcagccctgctttgtcttaggcaaggtcctcagatcctaagaacatcactgcaaatctaactcctcttttgagacaattctagatgtgagattcaagaaaggactcaatacagattctggttgcactgtgttgggagggcttgcaggaaattttccgtgctcctaaaagagaaacaacagaagagagaggccatctgtctctgcttttgattcatctggctatggagctagaagtcctggggcaatcttgctaaggtgctaagaggggcctgcaaggagggggtggcaaccaacaggaaagattagagccctccctacctctggactgttcatcaggtgaaattaattttcttgctacagccaggtaaaactgaatgtttcctccagcagcctgctaaagcactagttgatagatgacaactaagttttttcaatcctacataacagctgaaattttactttgaaaaatggcaacacatttatgcaaatgaataaacagacaccctttaccctcttattcttttggttttaggtaatatatatatatatatatatatatatatatatatattcctttctgaaaatcactttccaatttcataaataaactttataaggacaaattctgaagcaataatcattttatcgcaaaggctgataaaaaccccatgtcaactgaggctcacagtattctgaaaaggcagaaagactgactgcaggcagcttgggctgtgcttctgttgtgcttccataggactgcagagctgtgtatgaccaaagccttctaaacagacatggtagcaggtgcttaaatcaagcacttgagaggatgaggggggccaaggccaagctatggtacacagttaagaccttgttcaaaacaaaaccaaataaataataataaggtcggggttttgttaagtttttttgcatgagatcctgggtttaatacctggaacgcagcatcattcttagcatcccactctagggtagagttgggagtcaaccctgtgtgatgggatgtgtaagtatatacctgtacatatatagattactggtgtacatgttataaaaacatacatgtttgtgaacctaatgttagcagaagctccattgttgaagaaaacaaattgtaggagggtcagaatccaagtgctggcctaggtggcacaagaaattgctttcttgcagaaggctgcgtatctgggagtgaccgcatgcaaacagcagcatttcctcccttgcagcacacagagaagattttattttcctgccttcttggacacacatgatctacaaatgcattccttgcataactgcgtgttgaccttttcttatgtgtataaaggaaaatctccattgaaatcattcatctcaatgcgatgtgaaaattccattcatttcagatttcaacacaacttacatattcagcttatatacagcaaatgccttcagaagctaaacagaatgaaactataaatcctggtgaaaaaatcatgcctatttgagcctaagaatatttgccatttgcagctgcaaatgacgttcacttgtcctctcagaaacacctgaaaatgaagtgtataacctccaggtggagttggctctcaagtggctcaataccaaaggcacacctgctttccacactgcactttttctttcaatgatctttttctttcttcctattttttttcctttgagacaagacattactatgtagccaagagtgacttcaaactcataaccatcatcctaccttaacttccccaggcgccaaagccctggcagggtagggctataaaaccatagcaaattaaacactctcagaggtagaagaatgctaaaatgattgttggcaaacaccacaaaaggcctacagtcagccatatttcaataataaatccttaactagcccccatgctcacagaacacaaagataccggatcaccaccagactcaccctcttccaacacaccggaacatactgcatccattacagtgtcagtcattgcctctggctcctttcagaactccgccctcgggtcctggcaaaccatctcatttctttctatcatttccctttgtgaaacaggatcacaactcttaaaattggccagtgggctactttaattcctgtgataaaaatgcagtttttcctggggcttccgcaatcacattacaactgagctagcaggggtgggaaggaaaggtcacctaggctgagcctgcccaaatgcaggaaaggaagaaaagaaacactgtcatttccttttatttttaaaaaatctttttggattgtttacagggcagaagaatagtgatatagctagacacaaaactgtaaaaaaaataaaaatcctaaaaaataaagacaaaaaacatatgattataattgcttataagctaacagatttgaaacaaagtaagtagtttttatgtacaattcatttatttttctactttaattttaaactttccaatacaattattataatacttaggtactttaatgagaactttatatatatatatatatatatatatatatatatatgtcttttttattagaagctcattaatttctatgcaaatcaatttataaatatatatgttcaaagctacaaccacaaaatttacagtatgttttctctaacagaaatacattccatttttaaactagctgtcaaaaagaagaatataaacactgtgatcactgtgtgtctggggctcttgaaaacgcagtatataaaagtacaagtaaatttgtaattatcaaggtatttctcttaggtttcttcaaatctttcaataaaaggaaagtggtatttcaagaccaccctttcctgtggagacaataaacaccagagtcagatttccatccaggctagctgatgtaggaggagctcatacttcagccatcactcttcagccatccaaacccgacttgtgaatgtctcaacgtaacagtagcatacagacagctagcctctgcatattaattactgccttcagattatataaaaacttataaaaatgtaaactggaagagtctgagcccctcccacactccgctctaatgcctacccactccctgtatctccagggattctcatgggtttagatgctatgtgacctccagctgcaacttcctgctgccacagaattctgtttccagactgcatcttgccttccacctgatgtgcacttccagaatcagggcttggcacccatgcttctcaaaggaaagctgtgggcataaacaaggcaaatgctcagcacattatttttcttttgtatggtcaagagctgtaccagcctgatacctcaaacagggacctgataaaggagtctgttgtgaaggctggaactggcctacatcctcctttgagacccagattctcagtgtgatcatgacaaaccattaatcacaggcaccatgtgagcaagagcaatccctgggcaccacagtgtctcgtcccaaaggcagtttgcagagtctcatacgaacaataactatactacaaacaaatatggtttgacttgcttagaaagaggatggaccatcaggcgacttgggcaaggaaagtgctgaaagaaagtacttcagtctcctgactgaacacacattcaacaataggcagcagaatctctccattcccagctgcctgggtctctgttccccttttcccactgtctcagcacctaggcacagaagcccaggcccaagcacatctagcaactaatggccatttacaaagcaggaagggcagggtcaagcagtctggcttcctgctaagggctgcctcaggcgttcccatcaatttataatgacatgcagtccaccagtgagagcagccaccaaatgaaaagaaatacagtaacatttctcattctgtcttttgtgtctacagcattttttcatttgctcagcaccctagtaccttgggtacccatgttcataatatatttgaactgagaatttggttccatgagaagcacctaacagttacaaaaacagttgtcaaacagtacaagcattccttgattcttcctaaactatccctgttttttactttatcttttacatttcatatatgaacttagtacaaacatctgtcatttcaaaatacaacttcacagaaaatatacacacagtttatggaaatgtctttaaatcatcttttgaatttagttgataaattacttcctcctgcatcaacacatgaacaaaataacaagcataagacagaacaaattaatgctactgagattcacaagaccactgctgctaatggcacttttttatagtctgatgtcaaagacaaagatgcttatttatgaactactaaagtaagactgtgatataaggcaatctatcatgggtaagtgcaggctacctggagatgtttcaaattatcccttcttctaatctgaagggagaaccagcaagaaaaataatttcagcttgaaacattcgattctagtcatctaacaaaagaatctactccatcccggaagtgaggaccatcctggacagctatgaaggatctgaaatagaacaccatttttctataaatacttcctctctcttctgctaaacaattttgttaggactgatgaacactgttttctgcatttttctaagcactgactcagttctccaacagctgacagaggaattcattcagctgtcacagaaaagtgttctccaatggtgggaagattacatcgttccaatctccagaactaaggaatcaggcctcccatggtgaaatcagcataaacatctcactcttctgccaggtgactagtcaaaacaaaggctcaccaagtctttgggaagctgtttcttcagcaaatatttactgaccatctacactatggcctggcattgtgctaggaacccaaggtacacagataaaaaggaaaaatgaagaaatgatttgtttttacctaaaggccaagccaactagaaattcaaattgcatgagtatcctacagaagtccacaaaatatgggaaactggaagccaatacaaatgagaaaatcgtttcctgtaagagagaattgattagttccctcgtgggattattcacatgaataaatctgctggcttccttgcatcagaacagattctagattacagctgaagaaaacagtccacttagaaaatactgaaagctgcccaggaaaggtgctacctttaatcccaacagccggaagcagaaacagtggatctcttaatttgaggtcagcctgtctacacagcgagtttcaagtttgccagggttacacagtgactcttgtctcaaaacagaaagaaggggggaaaggggagggactacaagcaagcactagcagaaaagcttacttgtagaacaaaatacttttcttaaaagaaatcatgtaatatagcttaaatattataaataaataaaagctaacaccttaaattagaaatgacagtaaaagttaattagcacacacaattcatttttcccctatggactgaaaacattccctatgggatgatttaaatggaaatcatatacttaaaaaaaaaaaattgacagtggacttagaaacaccttcatgcgctgggaagtcaggcttcaagttcagtcaataacaaaagaagctttgcatgtctgtcctgcatcattaggacagatgctagatgacttatgcctaaagggaaggctgtgtaatccagacataagggaatgctttctctgccaattcaagtgaaggggttaccattaacataaccacagctgtaataaagaaagcttgtctggtgatacatgccgaagatgggaagaggaaagcaccggagcgcataattaaaacaggccaccttgctgacacagattacagcaacagcataacaattcttttaagatcatataccaataattaagcctccagtgaaggactgacaatgcatagttcaattagcactaacttaggattgttttaggaagtaactgtaaatgcttgatcagagagcagtaaacaggaagcaaccaagttgtttactattaactttcaatttgttagaactaaccaaaataagctttttctcttaaaaggcacatcctaaaacggaggggagagggggggcaatgttttaagagtatgtaatcgatacaaagattcaaaatacttaatatcaagcaaacacacctttcaatcacaacaaatataggattaaacgaacagagaagtcagaagtgctatcacactgaaggagaactatgagttcaaggtcaattggtatacaaagtgaattttagaccagcctacagtgaccctatctctaaaaactttttaaaaaataaataaaaaaacaaaagcttcatgtgcaaggtcctgggttccacccctagaacccaaaataaagtgtaaccatgtaactaccaggggcatgggaccagtgtctaactctttcagaatgcaaaaaagaaattatataaagccatttgtgcattaacaactgtttcttttaaacaggaatttcgggtcttggggtttgggtgagagcacagaaaacagtgttgactataccaagaaatatccccaaactgtagaatgtaatctctctatagagagttgcttcctataaccacaagccactcagtcaattaaattataaaaatgaatactgctttgagttcccaaacctgcttatactttcccttcctttctttctttctttctttctttctttctttctttctttctttctttcaagtttaaagacggaagttttcctctggtcccaacttctgctacctggaatcttggggatatttactgaggccccttgaggcctcatcatgaatttactcttcaccacaacccacaaaagcaagttattttctttagtttacaaacaaagaggctggggtgtgagaccatgactttaaccattttaagactggggaataacagaactactgaagacaactccacaacggatgcttagttcacagcaatttcctatgcttcaaatgaaatcgcacatggcttttctaaaaagcagcatcattcattcttctaattggttctttctttgcagtcctttctctttagagttcaaccttcctgtgttgccagatgttctggaagctgaagcatgaagatattgagttcaaaacttgccaaggagaacagtgagttcagcatgggtgacttctgaaaactcaatctcaaattttaaaaattttaaaaatggactggggttgtaacattggaatctttgcctgccatgctccaagaagccataggcttaattccagtcccatgctaaaaatagagcaaggatacttactaatttgatcactgactttacagcaggcagaggtgtcacccattaactgaaggctctgtctaaaccccaaactagaccctgggcactgagaaaaacaatgacaggcccttgatctccttgcagctttttctccactagcctgtttttaggatgatacaaagggtggatattctttgtgatgatattccctagcacatcaggaccacagttataaacataaacaaatgcctgtacctggcataatggtgctgaaactgggactctgaacccacaacttagatacactaatagaaagagggattacacagcattatggctggaagagaaaaattagacactgacggtcaacaaacattttttcctaatctttctcatattgactatcttccttttaatattcattgaggaccaagagaatctatttcctttcaattaaccacagcacttattacagaactagatacatagagatcctgagtaagtattcagtagttactttcatataagataatgaggagaagttccaaatcctgagtgttttaaaaccctggacttaatgaatcagaaaaaagtgaaagtttagaaagaatatccaaaataaatagggtcttggggttggggagaactctgccagcaggtgcttgcccatgcaggcatgaagacctcagttccatccctaaaagccacattaaaaagcggggtacagtggagtacatccaaaggttggtggaaacagaagatagttcaatctctgggacttgaaagtaaaccaatctggcctacttggagagtaaaagaccctatttgaaaaaaaacaatgcagacaacacctgaggaacatccaagacaggtacacacacaggtacttggtgcacacacaggcactctgtttacacacacacacacacacacacacacacacacacacacacacacacacacacacagccttgatgagaagaaattcaacaacacagcaatctatgattataaaatcacatttctgaccataacatacagaaaacccatcaaagatgaagcaaggttaaaacaaatctctctaggcatgaaagccttcaggggaaggcggtgctcccatggatccaaaatttcatcacagaaccccccctcttgaaaacctttcacacttttcacactcaaaattaaacacaaaccaaaagttccttaaggggaaagttttattttaattgatgccaattccttctagctgccaacaaggatgggaccattgcaattccagacatctagaaccacaaagggctgtctgttctatagtatcatcttatagatttgtatgtttgagtgccagggtgtgtaggcaggcatgcacatgttcgtgcacacacaccacacgtgcacacatagggatgtgggcatgtatctatcaggtttataccctaatctgactcccaagctttattaatacaacagtaaacgtagctgctatggggggaaggtgatacagagggtctcatgtagctcagggtgggctccaactcataaagtagctatgaccttgaacttctgatccttctgactcagccttccaggtgatgggattacaaagcatgcaacaatatgcccaactggtcttaaacagtgagattaagaatggtgagtggaaaggcaaggtatgtatgtataatggcacatatgcatcttgtgtgctaacaaaatattagtttaaaaagggaaaaaaaataatggtagaagagcaggaggttgaaggactacaactaggagaagagaagctgagagaaaaaaaaaagaaaacagtgtttgtgatgggcttcgaagaatgggtagggcatgggcaggagaagtggagcttttccaggaaccagggtaaagtgtctggccaactatgagaatgggctgagaaggaaacctgagattaacaaaagcaaacaggaggaaatacagttagaaagggaaggccagatctgacaatacctgatcaactagtctttattttgtaagtaacaggaagtaatgaaatttttcaattgatgacatccataatcaatacagggcaagaacagagtaatgttgaaaattcaggcatttctgtccctcccctttatctgtcggaattgtaagctcagtccagaagggaagtaggtgttatcctgctctaatgtgaggatgagacttaacactcctgaagctatatggctgagttttctctgtgtccaggtagcactgaccagagcatattacttggtgtttcaacaccccatacagtcctcccaatacacctgtggccagctcactgacccagagcattccagataacccaggcagagaccttgaggaagtggggttgagggccagaggagcaccagtggagtcacaagaactcagcttatagtggtatgcagttgcagttcacagccataatacaaaatcagccaaagaaaaaggagcctgagcaaagtctaactgaaaccagacacaagcttccacagatcctcacaaagcacacccatagaagatgtacaaaatgtcccccacaaccacctgtaaccactcacgttcacctcagcctactatgagcccaggattcctactggggattaggcacaaatgcactatccactcagcacctagcagaaccccagactcccaaaacggaagcaggtgttcagtgaaaggagcattatttgtaaggacagccaaacacacacgttcccagaatatggcacaagaccaccttacagagcaggctggctttgttaagctctcttggacaaagggtccaaatggaatctttgaatttgagtttcaatcatgctccagattaagatgccctgggccccaccaaactagtcaccaggtaagtatggagaaagtccagaaaaagtgggtgtatgactgcttttgtcacagaaatttactgtaatgtgtcagctaatttcatagtgtaataaaacagaacacaaatcaactatgtctataaaacatgcattatatattttactatttaattataatactataatcatttaaataattacatactactatctggatgcaattatgtcaataaaaacatattgcccttaacctcagaaggttccattttagaagaactgtcttccactaagatatagaaccaaaaatattcccttaggaacacatacaaaaagcaaaacaaagtggtaaggcatacctgctctgtctctgtctaaaagagtctttatagtttcaaaataaatgaagtttatctccaacctactcatcacacaagccctaaaaaacacaaacatgctattataagaagactaattttcagcagtaaaagaacacttgaaacatgataaagagcaatccaaaagtacttttgtttgttttgcaaacaaaggacactttggaaaataaaaacctttaaactaaaatattttaataaaagaaatacaatcttataaatacagattctgatgctgataaatttattcactgtattcgcctactcaagtaagccacccactggaaaactgggaagacaaaaaaaaaaaatccaacagcctctgcaccatctgattttgccatgggttctaagaatttatatgcaagaacatacaaagaggctagggaaactcaagcagccatgcagctttagtttcagcagacaaaggtgaaagtaaatgtcagcaagcctgttactttcttgatcactagaattacacagcagactcctcccctcccccatgctatcccagaggggacagtgatttatctgcatacagacaacacattttggattccaaggaaaccttcagaaaggtacaaaaatgcgtattactcatacccgaattataatagtggccccctgtaaagataagttcaggtgtgatggctaaaatggtttatagtaattctcatggatgtgaaggaaaacaaaagtaagtttgggcattcaactagctgtaaaaaaacaggttaggaaaaatagttttttgcggacatagacctgagcatgcccaagctaatctgagctcagaagctgagcagagacaggacctagttagtatctggatgtaagaaaagatgatgttccagaaggacccacatgatacacaatggcaagctggggagtcgtgcacctcacccccataacacccaaatcttcacacactcatcttctctgttacattttagaaaaaaagcaataccctgggctgaccactctccagatgtcagtatgcatctgctgtggaaagggccttctgttgtgggtcacagccctatgggctaagtcagcacctaattaaagtagcatgtattaagaaatagggtcaacagggcagtggtgggatacacctttaatcccagcacttgcaaggcagagaaggaggatctctgtgtgttcaagaccagcctggtgtacaaagcaagctatggaacagccaaagctacacagagaaaccctataggagggagtgggagagggagggggggagggagggaggggaggggaggagggaggggaggaagaggaggagggtaatgggggagacctttctgtgtatgtttatcttattgtttgttgaataaagtactgttagccaagagggaagcaagataggtgggactaagagtcaaggatgattctgggaaatgtagtaaagagaagtcttgtgatccagacaggaagtgacatagcaggcagactcagaatataagcagggacaagcaggaaatcgctctcttcctcctcctgtcttctctgtggagtctcgatatgagctgggcaagagaggacgcatgccgctggcgtcctcaatcagataagtctttataaaatatatagattaatgattatggttgataattaagactgagctagcagataagaaatcctagtcattagccagcagcactgtacctaatataagtctctgtgtgttattttggctgcccatgtggtggcgggactcgagtggatggcagaaaatttatcattatgtgggtaggggggtggggaggggtggtcaaggaaggctaaaggttcatagttgtttactatctgtttctcccctgctaccactcttaccatctaagaaaaacgagtttattttgtactaaataatcatatattcctacacacgcaccacacacacacacacacacacacacacacacacacacacacacgcacgcacgcatgcacacacacagagagaataatacaactttcactcaactatccagtgcctaaattcaaaattttaacactgccaccagctaatgttaatgctaaaaatgtagcatggtgtgaaaatgtgtaaagcatatatttataaattggttttcttttaagagtcacttgcctggggttgtgtgtacaggccagctaggagagtgtttacatagcatgcagtaggttctgggttgggtccctaacactgcatgaacaagatatagtagcatagacctgtaaccccaatatgccccataatctcagcacttaagagatggaggtgggaggatcagaagttcaaagttgtccttggttatgtagccagcctgaggtacagaaggctgtccacaaaaaaactggcgcctcatggaggaaaactattaaaacaatttggctggaaaacaaatggataaaattctctaatattctacatggaaactagaattcagaggaagaggccgagggaaaaattccttccctccttagcaatatgggtcatcatgaactatttggcactgtaaacgtcagggtataagaaactgtgtccagcaagagcactagatagcaaggagtattactgccatagccactgccaccgccaccacggctacaatgtgcaagatacccaatcagacagggacagatgactgcctcctgcaacagagagactagtccacagccaaggatgggcaggtatcccttctcttgatccctctattccttttatacctatgtagctcaaactctgaggtcaaattgcaaacagttttggctctatacacgctgggaaagtaaacaacgaagttatatccaaagtgtgaaatcaggccggacgttggtggcacacacctttaatcccagcactcgggaggcagaggaggcggatctctgtgagtttgatgccagcctggtctccagagtgagtgccaggataggctccaaagctgcacagagaaaccctgtctcaaaaaaacaaaaataaataaataacaaagtgtgaaatcaaataaattcatactgaatgatggggttacagcaataccgaaatctgtacgtgtgcacatatgtagaagtgaacacgagtgtggatgcatctatgtggaggtcagaggtcagatttgggtgtcattcctcagactccagggattttcttgcctcttcctctccaacattggaattacaagcacacgcccagcttttcacatggattcccagggtccttgttgttggcatgctccttaccaactaaaccatcccctctgctgtctttacttactgtgattttttaggctttaaaatgcagtcaaggctgaccttgaattcattatactcctgcctcaacatcctcggtgctgggattacagggtccacactggcaatcctgaaatattttacttttcctagttttcaggggggtatgaacaatagagtttgggggagggggcagtttgttgttgtggttgttgttggggtttttttgctttctttttgtttttcccccacatgtaatttcctatgaaacctatcctaacaggtaaatctcctttcttctggtaaggaactggataggatcacaaacactagaaatctaggactaaagcttaaatgaactcgatcccatagaataagataaaattcattatgaaataagtactcacagtaatggagaaggggaaaaattaatttaaagagatgtgggaaaatgcagaaaaactgtttttatcatttacaggtcacaaaccaccaaactagcaacatggaactacattgagaaaagtgaaatatatatcagcaactgggggaccagcaggaaaagacagaaagagaatacctgctgcaatcaaaattgctataaacttcctgacatgatttatttggtctggactcacaggcatcttagttcagaagatgatacagaaatgttatatgctccaacacacaccatacattgtattattttcatgtatagggatttttttctgtttagagtaaaactaaggtaataaaagataagccttggtttctatttcctgagaaatgatagacagaactcatgatactgaataaagacactccaggaagcatcattaggaaaactgggtatgttccaatgagttccaatctccctacatttctaaggcatgaagcctggaactaattacaaacaaacttcagatccatgttatgaaagctttctagcaaacagataactagacagaattaatcccactgactattcaagaaggcacaaattgaagatattacataggcaactcaagtatgaggtgcaagctcggactttaaaacatattcttagtggaaattctgtaattataactctctgggaaggtcttcacttgtgttaattacagtcatcaaaactcagagcagacttcctggaaagatggcacagtgctcttagatgcaagccccttgtcttgatcattacatgctgtacacatgtatcaaattgccatgctgaaccctacaaatatatacaagcattatgctaattaaaattttgccaggaaaattaaaaaaaaaaaaaaactttggcagggcatggtagtgcacacctttaaccccagcactctggaggcagagacaggtgagtatctgtgggttccaggtcagcatgctctatacagttgagttctaggatagccagggctacgtggctaatgagactttttaaggggaaaaaaaattctattctttaaaacaatttaaaggtgaaagttgagaaagaaatcctcacttaaggcaacaatagcttaggacttaagagcagacagtataagtggaccaggcagtgtccacacatgtgcctctgctcataaaaataagactaagggaagcctgtggaaaaagaatctccaacccctggagaagccagtaacacctgaatggaactcaaatccctacctatcctaattgagggggaaagatggttaaggaaaactacaaagttagcccacttcagtcttccctcagaatccacataactcaggaactaactctgctttggcaaagtgaccatcgagaagaaggctgtctgaaaccatctccctctaagtgagggaaacagaaggaattagggcaagagtcaacaacataaagaagtgaacttcaaagacgtacccagagctgatgccagtcttcatgccactttactgagaaaagaactaaaattaaatgcataccatgatctcccaccagtaataaaagaaagacatgagctcaggacaaatacagagccaagtcagtgagaatccacccaccttttcttggacaagtaagctggacaaaatctagaacatttcctaaatgaaaatgaaggcatggcatagaatatagaaaagaaccttctggaacatttactctagaaaatgaagacaagctattggttctgctttgtctttatcaagaaaatttaagaaaatatgcactgctggaacaggacactaaaagagacagtaactctcagagatacaaaagggaatgagaaacaaacacttgcaaaaattaaaagggaatttggaggtaatatacaacaggcacttcattcattcaaccccaaatttctggcacttgttctttgtatgccaagcactgccaagtgagtgatacagaaactctgagcaaatctcatgggaaggaatagagagaagcaactagagaagttgacagtttgggtagagaagcctcagaacccagttataaatgattggtgtgtctaaagaaaaaaggtactatgacaatataagaaaaaaatcatacattggggaaaatccttgaactacaggataacctatatatagaatagggtcagagtatgtagagaaaaataataaggacaaaacagagaagcacaacctgctgaccctgctaagctctcatgttataaaaacaaatatgaagaggcaagtcacaaagaaatattcaggctgacttcttataaattcagatgtcaccagcctggtctacaagagctagttccaggacagcctccaaagacacagagaaaccctgtctcggaaaaaaaaattaaataaaataaattcagatgtcagcaaacactacaggaacgtctaccacgtgacaacgatgtggatataaaaagagatgtcatgtatgcctcctatacccaagcaaatcagtgtaaattacttcatctatggaccctttatttaaaaaaaaaaaaatctacttggaggtatcaatcgagtctctacttagcatgcacaagaccctaggttccatacccagcattggggagatagataatcaaagaatattcatttaaacacataattcatgctaaatatatttaatacagacaaaacacctacaataaaatttccaaaagacacaaaacaataaacaatatgtgtcctaatatttgggtgaaattcttcagacttaacttgcaattatttctcgtgtttatcccactatttaacatgaaatcaaaatctgaaggagttcttaaaacattgtgaaagtgtgtgagccctaccctatataagtttaggaaattttgtacaaccatcttccaaacaaggatgactgagactgcaggcagactcaaacactagagtggagcctgcagagagtccagatggaagccacggaagaacaggagagtctgtagcagaagggcaggccaggaaggttaagacagatgtgaatggtcagacagctgttcccacagcaggaacagagcagaggaaacacgggttagctctgtgaacatagaaagtcctgaagcccactgacaaacatctgttatattcaaactaaggtaattcagtttttccaaaatttagccactaaaagcccatcgataaagcacagacctaagaaaaatgcccttagcaattcacagttttacagtttttagacagttcatcattccatacattcactgctgtctctgaaaagactgctacagaaataaaacttgtgtaaattaaatgtgttactgttaacactcaccagtaagatgtgaagaatggttttatgccttgtactgcctgtatgtttacaataaacaagaggaataaaatgcataacacaaataaaacaccaggaaatgtagaaaacaaaggtaatacagatcaggggccactaagttatggccagaatgtgttttcacaaccagaggtttatctgactacagtcacagcaattcattaatgaagtacttatgtctgagctgggtagttcaacagaaaccacacatcccaccctcaacaggacactggaataagtgaacagtgacccactactggctttggtgactgtctgctttactgtacatggggaaacataataaaactatttcttctctgaagctgacaaactgggaagtaatgtgcataatgctactgaaaactatatagggttccaaaacattaacttaagattaaaattagactgcatagccaagaatgaagccacatctttaatccccatactctgaggcagagcaggcaaatctctgtgagttcctggccactcctggctacaaaataaaactcggtctcaaaaacaaaagaagagggaaggaggaaaaaaaaatccagattacatcacttccaaattatcaacatagaaaatacaacaaaaaccttgtacaggaccagaggatagctcagtgagttaaggcacttgctgccaagcctgatgacctgccagaatctacaaggtccaaggagaagacttggctatcctttgacctccacacacatgacctcacaaaattaattaattttaaaaactgaaaagttaacaacagtaaatagaatagaaaagtgtggtggcacacccctttaatccttgcctcaggaaacagagacagatggagcttgagaccagcctggtcttcacagtgagttccaggccaggcaggactacacagtgagaccctatctcaaaaaaaaaaaaaaaaaaaaaccagaaaaatattttgtagttctaaacacaggcgttcagtgacccacagaaccgacgatgaggtactgtggctgttgtggagatgtagtgtgaaaaaaaaaaaaaaaaaaaccagaaaaacaaaacaaaaagaatagttgaaaatgagagaaaaactcgatgcaaatgtaaacaaagcaacactcaacacttgtgaattcacaatctaaaactatccataaaattgattaaatactaattctcatgggcatttttatctcaaaacaggatactcacacacattaaaagcaaaaattcacgggcgttggtggcacacgcctgtaatcccagcacttgggaggcagaggcaggcaaatctctgtgagttcgaggccagcctgggttccagagcgagtgccaggataggctccaaagctacacagagaaaccctgtcccgaaaaaccaaaaaaaaaaaaaaaaaaaaaaaaaaagcaaaaattcctagaaaaaggagaaattgacataaacactaagctaaaagatttcagcaaatatttagtatttggcaagttcagaacttaaatgaggtaatcagtgacaagtataagtaatacaaatgaatatacatatatttattatacatatatacatatgttttgtccatagaacaaaaatcaattaggctataacaagaccatattctgtctaaatgacataaaacaaggaataactagcagaacctaaaaaagatcgccatcatttggaacaatttaaactatcttaaccatagctcagtaacaaaaaagagcttagtatcatggcacattccccaaaagaagctaaggtagggggactgacacaagttcaaggacagcctggactagacatctgccatgagactatcccagaaaaccaaaaagtatagagaaagtgacagtgaatgttgtaattttcgaatatctgccaaaagataacaaggaaaagagacatgcaaagccttcaacagctctaacttaagtcaagaaaaatattaaagaactgaaggattttaatctgtcagagaaaaagtaccacactataaacctaaagaaacagagcaaagggaaatgagtaaggatgggtaccaagagcacccaagggcctctgacaaagtgctgtgacatattcaaaacactacaactagaagtcaagctgtatgtaaaggttccacctgcaactccagcacttggaaggctgaagcagaagatcaggctgttcaagggcagcctgggctacaggagaccctgtctccagaaaactggggaaggaaagtgtaagagagaggaatagaaagggaagaggagaggagggagggaaggatggaaaaggagaaggggagaaagatacacatgaatgtgtagcagtgaagaacttaaaaaggggaaccaagtccacatgataaaatcataaacacagtagaggctaatttggaggccagcttgagctacacagcagatctgagtctcatttaggctaatggaatgaggagttctgtttcaaacacaaaacaaaaaatccagagccctgataccagatcaagtcaaaccagaccaaactggactaaaagcttacatgcaatgcctaagtaaagctataaaactctcagtacaacaggaagggaaacgttcatgaccctggattttagccatggtttcttaacatctgacactgaaagtggaagcaacaaagaaaaagctgacaaactgggcttcatcacaagtaaaaactgctctgcttaattcaatagcagagcctgttggaagtctctcagctgtctgtcatcatcctcgtcgtcacaccccacccccctacacacacctgtggagtttttgtctagggcgtcctttcaaagttctagaaatgcactaacaatgttcgagtttaaagtgatttttaaggcggctgtaatggtgcacaccagtagggtatgctgaaaaggtggcaactaccaccaaaggccatttgaaaagccatacagaaatctactactgtaaaagcttcctaaaatacatacatacatacatacatacataaaaggcatctaaatgaagtcaccatataatggagtagaaaaggccccaagtaggtatcttatgacagaaagtaaagctcccagtgccaggaatgggttacatcatgaccaaaggagtcccacagaatactgtcccaccaccaccaaaacataacaggttattgccaaggcaattagtttttcttcacaacctgatgggaagaccctactgacgaagacaacgctcacttatgtcatcaaatacagaaaagctggtctggtgcctaactaagaagcttcaccctgctgactagtgctcatagtgctggcagatctacacacactaccacaggagaaaagaaatcatcacttttatccagctacaggccctcggacctacaacaatgacctggatgcaaaatacactgctataatagtggcacaaatgttatgggaataaccaaccactttctaaaacctgaatctaaggtccactccatgggatggaacccatacctggaactgaaaagactctataggtcatgggccttgggaaaaccgattactattattctgtcaatggaatacagcaataaaaatgtctcctattacagtactcacagatcagtacttcagtcaatcatcatcacagaagctgttccttgcattaagtggaaattaatacagagatctacaactgaacaatgtatagagaatgagagactttggaacacttagtcctaaacaggatgccttcatcaaacccctcccctcaaggatctatgcagaagggggtggtggtggaaagcttctaagaaacagaagagattcgtgactccaagaaaatagtgtcttgtagaaccaaaagaaattatacacaaaagaactcacaaagactgtggtagcaaacacaaaacctgcataattttagccagatgaggttccaacatgagtgaaggaagtggacatagggttccaccctaaccaagaagctatttgtaactgatacctgctggcaaagggaaagtcagttttctataaaggagtgtcactgagtataccaagcaaaccccagcgcaggtcccacactcaggagtagttggcaaacataaaatgaactccatgtttttttctgtatagacttttctttcattttgttttcttgttttctgccttattggtttgtttgattctcattcttgtgttttgtggtttgcttttattttgagagagagaacacaaagctgggtgggtgggtattgagatgggaaggatctgggaggagaaggggaagaggggaagaaatatgattgaaatacattgtataagaaatattttaaataaaaaataaagtgatagtgcatttgttagggtttttgattttgtttttttattagtatattttgtaggcaattttgaaaagaatacacagactacaacagaaacctgttcaataaagtgcaaataaatacaagatcattttaatgtctgtcaatcagactgacataaatggtccaaagcagtaacattgccaacaaatatgaaagcaaccccatgtatacacttctgaaagcagggtcaattgttaaataagcctctcactggctgacaatcttatgccaggaactcagcctgaaggtggtatcctaggagtgtacagagatgcaatccctacagcagccactgcagcactgcttataaactgtcttgatggaatcaaagtaaaaattcatcaagtacaaacagtgatactttggtaaacaactagctctccaggggcctggagagccctgatttgtatagctttctccaatttctgtggtaaacactcctcccacagctaatctcaaactgccaaagtgaaggcactgggttttgtaaagctgagatgaaatttgtagaactagattttatgagctgatgcaaactagccacttccataagactcaaatgcactggggacacgggagctctctgggtggaggacttgcccagcatttgccaggctctgggttcaacccagatagctcacgcacatatgcacacacacaagcatgcactcatgtgcacacacacatacacaccatcccactacaatgctaaaaaactattaattgtgatatgaaaattttatattaacctaacaatatctagaacatatcattgaataattacattttgaacagcttacagacaatgtgaattacatgcatacttcatttccatattcaaaaataaccatacaagagtgacaataacactacactcaatttagtttgtatatatggcaatggcaacaaattggattttcatggggtaccttagaacacattaagattttcattttgaaatagaatataccaaaagatcaacaaatttggcttgataataatttttaaaaacctactgaataatacaaaacaaagaaaaaaacaacagggagggattaaatcaatttcagtaaatatgacaaaaaaatctgagtttattcatctgcatgcttggagcatataaatgggcaaaagaaatgaagagacaaaaaaaaaaaaaaagaaaagagccaggcattggtggctcacgcctttaatcccagcactcgggaggcagaggcaggcagatctctgtgagttcgagaccggcctggtctacaagagctagttccaggacagcctccaaagccacagagaaaccttgtcttgaaaatccataagaaaaaaaaaaaaaagaacacccagaaaagggtcatagttcttatgttatactggaacattttggatatctatggattaatttgtttcatcttttcaattatgtatgaaaaaaactactcatttctataatttcatgatcactgaaaacaaacaaaatataattaaataacagaatggactgtcatttactcaaaggttaacataaaaatataatttatttaaggacataagaaaactctcaagtgagaaaaaatgtttttgtctcagacttgaactttgtattaaatgaaatagttttttcactactaaattttttttgctgttttaaaaacaaccaaagtacttgaaaaaatactaagtgctcacttctagtttaaaaacagaaaaaaaagaatataaattcaatactaaaaaggaagaatagttgtaataaatatgtatagtatgtaaatatagccgggcattagtggcgcacacctttaatcccagcactcgggaggcagaggcaagaggatctctgtgagttcgaggccagcctggtctccagagtgagtgctaggataggctccaaagctacacagagaaaccctgtctcgaaaaacgtgcgtgcgtgcgtgcatgcgtgcgtgcgtgcgtgtgtgtgtgtgtgtctgtgtatgtaaatataaaaatgtaattgtgtgaccacatgacttgggcctgactgatgcagaaggcattaattaactaatccttggaggatacactgtaatctgaggagcaattcacagactctggggatttagaaaaaccccagagaagactcagttcccagagtatgcatggtctggagcagaaggaagtcctgtaggaaataggcttctcagaggtctttggtgaaaaggcatttagagttggaaagtttctctaaggaaatatacataaagtttcatcatattctccaatgaaacaacactttactgtggtgatattttatgatctaataaagcctgcctgaaaatcagagtgcagagctaagccactagtcagccatacacctaatttagagctaagccattcaatggtcataaaggccaggcattggtaatacacacctttaatccagcactcaggatactgaggcagatggatctctgtgagttcagggccaccctgggctacatgagagtgcatcagtctacaagagaaacagagctggtgccctttatcccagcactagagagaatataaggagctcagtgcagtctcagtgagtcagagcagcagtgcagtcgggaacggtgtggggttcggtggatcgaccctttggtcaatctgaacactggtagaagtgagaactctctagtggctggctgctttgtttatctgatcttcagcttgaacccccaatatctgtctctgtgtttttaatattcgtactacactttaccaagaaaatgctaggtgctaatcagtatatgagaaaagttatgggacttgtcaccataagaaacagtgtctgacattctaatcatttctcagggaacatcctaaatagtccaacataagaaacctaagaatgagcactaggaaagcagagacaggtagatctttgtgaatttgaggccagcctggtctacagagtgagttccaggatagccagagctacagagtgagaccctgtcaaagaagataacaacaaaaataggtatgtccatagagcattagtcattggacacagcaaggacttcccctccagactcactgctgtaaaccaagagtttgctacaaggagtcagctaaggcaaatcattagttccgtcagaaaatgaagcatagaactgaagactgacttcaagtacctttttgttctagaactacagttctttcaaattattcattgttttcaaaatacattttcccatattttgagtcaagaaatcccattcagttgggatctcagtagtgcagctccattttcaacgctggtctcaattagaaacagacactgagtactttttaaaaatgttagggaatagcctggcagtggtggtgcacacctttaatcccagcagaggcaggaggatctctgtgagtttgaggccagcctggtctacagagtgagttccagggcagcaagagctgttacacagagaaaccctgcctcaaaaactcatgagactgtagattttaaaaagaaaaagaaaaaaaaaaaaaagcctatgatagatttgaagatgaagacccccttgatagactcttctctactaaaatttttaagttctttctgcaaaacatgcctgtatctgaatatcaatctgtccagcaagaatagctcatgatactgcttatcttcttgttgctttgggcaactgaaatgtgttctgctctaggagaagcaagccaaataaaagcatttcctggacaagggtggctcaaaacacacaggagagcagagttctcagaagaaacatatttttaagcacctcacggatctgacagaaaacaaaaactaagaaaagccatggtagaaccaggctgcaaactctttttaaatgtggaccattctttgccagactctgcagtactttagctctgaaccgtgtacacctactttgcactgtgtgactgaaaacgtagtcctcccatccaaccaaagattccttgactgcccacctcccaactccccactgaggagggagaataaagaccaagaaacgctgtggggggcagggggggagctggaagaggaagcagcacttgcctgcttcctgatggaggccactgagcaataggatagacatttctcctttgctcccctgcctcccttccagagcctggtgaacacaacaacagcactctctgcctttccacaccttggatcccatctctattctctgcctggtcactattcttgccctaatattgtccaaatacaaagccaagagcaaagccaagagcatgatgctatgatactgagaggacagcaggctgaggaaagcagggcttgccaccgtcagtcaccagcctggcttccctggcagtttctggctcttctcagttttcccaagacctcagtaagagccttgctggtgtttctttgaccacatctcttccagagatgcagacaagggaaaaggaagttgccctaaggttcctcttaactatgtacatgccaactagaatggtagaggtcatagcatcaaatccatctgaaacaaaaaggtatgaaattcttcatatatccctgccacggatatttttctggatatactgtaagccccaagaaaagaggggcagagggatgtgatgaacaccagtgctctgcttactgctgcatctctcctaccacctccaaacacaagagagccccgatgtgttcctcattggaatatgaggcctcaacgcccacctcaccagcccacctgtcatcactcacagaaaatggcagagttgcacttgggaaacagattatttgtaaactagtagaagcaatgcttaaagcccagtggaacaaaaacaaaagtagcaagtcagaggaagctggcaagggtagttaaaaaaagacccctgcctaaagagagcaaggcaccagcactgtctctccagctccacccctgtgcctcccaggatatcgcccttcctgtaggaagcaagagacccatgctgatatgacagaaggattttgataccactctctgtgaagacacagctcctatcagcaccatgccaggcaggcagcaggagggagcactggacagctaaggcctcactctcaggccttgcttactgaacatgaggacccccccacctctccacccctccccaaccccaaccccaccccacccccagcaatcaccagcagcaggactgcctgtatcacactgagttactgcagcaaggagagagaagatccaagctagtcagcaagaggcccaccagactggcaatgcttcctgtaaagctcatgaaaggagaggggtaccctccccactcccaaatactcagacccctcatccacagatgaactaagacagaaagtaattgaggtccaaggttacaaaagagaagggagtttctaagttcacgtggtccttggagatctcatttaatttcttcattctccgttatagaaaaaaacaaactaagcaaatgaacagaattacccattaagatcactctataggggagggaaaagaaaaataatcaagacaagtaaggcaggaatactgactgcctttttacaggttgggggaagatatacattaactatttcaaaatgcaccataatggtgttttattatttcacaaagccaatctgccattgtttcaaatcattgtatgacttgtcagttctcaaaaatatgccacaaaagctacagagtcctgcaattcttttaaggacaaactatgaacaagaattaaagtcatcctgtattattagaaccagtcgcaggaaatgggtcatctctctaggacaagaggaaaattgcatccgccatgtgcagaaagaacatacactgattataaggcaagcatagtgaggtacagaccttaaaatatcaattcatgatgcggaaaaaaaaatcattgtatcgctaccttgaaacacacacacaaacacatacccctaaaagaatgtaccccaaactgactgggcctaacaaaaacacatcctccccaacgatctgtgcggaaatgcaatcagaaaagagacactataaggctctcaattagctgagaccagagtgttcaaagcactgcataacaaagacgtgctgttactccacgcatgcccacagcccagaggaccttaccattccagcaaacacacggcatcctatttgcaaacccagcagcccattagattaccctgcactggctcactagctctctgctggtaatcatgaaccaatctcaagtccctgccctctagaaaaggaaggaaaagggatttggcattctattgggtaccacagtaagaattacagaaaaaagccaatcatctttactcgatcacagacccctttcttttaatgcaccgaggaggcagctaacttcacacacagctcacgaccacatgatgtctgacagaaatgggaagttctccaagtctgagaaaatatgcacacagcaacatttaggatcctcacaaacatcaagagaaaataaacatgtgggggtattcataaggggtgtggtaccaaaggctgggcagagcacaagcacctctacagacagaaagctgcagctaccaggtaacaaaggtggcaaagaggccactgatgacactgctgcccctacagcaaagacgtgtatgaaaaataaaaaggaacaaaagatattctatttccagcttttaacaagtaataacaaaaaaaagtcaagtagttttgaaagaggcaattcatttgtgttttcagttctccaaggggggggggggggtcacaaggctatctccatggaatatacatactgggtcctaaacacactcttcctgtagcagagccaaaaaacttcacttcacctctttctccttaatttgtggatcaattattgttcccttctgtgaggtttcgagaatataatgacattaataacacttcagatcccaaccacaccacaatccattaaacacttatttgaaactactttgtttctaaggcaatccgactggtcacaacccaagattaaccctacaataactgtgcttggaattctgaaatttcaaaggtcctgtgtggctaacagcactccaccagaacagctgcatctactgctttccaccctgaagcaatgtgacaatgaaacattctcagcagaaaatggatgggaagccatgaggccacaagcattccacctctaaaacacaaggcctcttactgtatgccctaggtgggccacaggaacggaaaatggagaacatatggacaatacccactggggaaaaaaagcaagaaatctgcatctattccctccaactattctgctttcttgtgggaatccagctgcctccatatccctagttactgaaaataaagccaaggtcagataagccatgcttgctgtgatcctgggccaccatctttgccacacagaagcttccattccagtagtttttcagttacctgactcaaagaaataatgaacattaagttaggaattcacattctccagaccagccactttccctacttgtgtggactccagaaaggctcccacgacggtccacaatacatttggccttttcttttgcatgatgaagcaacacaaaagcgagcaaggtgacatcggcaacaaccaagaaacctgcctggagactgggtccttcctgttggcacataactaagcaacaattcaggtaacacacagctctgcacacagacctgcttaacatttcttcatgtggagagcatctgataggtggcgattatttcttaatatatgactgggaagaaagtctggacataaagtttattttccagtaattggcaagcatttgtttagcaagtgggtgtgctggatcttcataattttacttatgaacaatgcttattttgttttttaatactgaactatagaggctggaagtgaggtgtggctcagcagtgagcacatgtttagcacacatgggtccctagattcaatcccctgcaccaaaaaaataaaaaataaaagcttttagcaaatattccgtgctgacttcagaaatgacagctaggtatgaaggctaaccataggcctaactaacatggcaaattcagtctggggctctcagtgccacaacaactgtttgtttttctgtgtacccacttgggactctaattcatcttgtcagtatgtgtaggtccttctgccatgctgctactcattagataagaaatcagtcagatgtctacatatcagtgacatggcaaatcaaaagtgaccgtggaacatcattagtaactgctgcattctcaaaacagggtccgggtctgagaactgctgttcttcgtgttactccattcagcaaaacaagagaagatgctctgtttactgtacagttactgccacagatttaattaccaacaatcacacgtcttaccttctattgctatttcacacttcccaaggattaattctgcacaaatcttaatgattacctaacagccactgtagaagtttccctttgaaaatcgccactgcttgcctcttaagccaggaagtgagtttaaatctgatgctacaaatatatgcatccctctcaacccaatatgccaggtctgcaggagacagcccctccgccttcttgagaaaacattcccaacctgaaaatggcttccctctcccaagacatccccttcactctctattttccctcttcaaccccaatcatcgttccactaacatcaacacaacaacagctcccatcaaagagaagttgatgtggattctggaagcaaaatcatcctggaaaaccctgttcattttttctcaatataaagattggctggatcatgaagaaaaatcttttcccttttctgctaagtttagcgtagcacacataagcctcatagttataaaggctgtttcagatccttaaaaattcatctgtaataaaaaaaaaactatatttattgagcatgtctagaaaatgaacataagccaccttgtaaacgggaactgggctagtatttctaaataaaaaagaagctaccaattttgtttgtggtaaacaaaatggctactaaattgttcttctggttcccttttcaacccctacatacaaaatttgaacagatccacacagagtaacttcacacagaaaaaccttcagcagggttttaatgtagttcaaaactctctgatgacgatccacaggcataagacaggtacatgacagataaggataggaaatctgcacagctccatgaaaaaaaaaaatcttactctgaaggctgtcaatcagagctatggcttggatttctaagacatgtttccatttcagcattcagatataaatacctttacttttctgctttttgacttttttccaaaggaagaaatacatacaaataaatcttgatttttagaaacatgttcaacactttaaaaacaaaaggattaaaaagcattaaaaaaaaaaaaaaaactggtcagtctttacagcaacaccatattttgttatctccagggcaggaggttcagggcagccaaccctgacagctactaagggggaattggaagagtatttaaatgtgtacaaagcaatactctctaacttaggttgtacagagcacccactcccagcctttcaagtcccttcttgctttacacttgtaaattccaatacaaatcccaattcctaacagtcggcacttaaccgctgaagtttccatcatgtcagtgtatgtattaattacaaaaatctgtttgatcatctaagaaggagtattaaaaattcactatgatcaatgtatcatgggagaaaaacatccaataaaatattgatatgtgtaaactagtctttatatgataaacagtaatcaaagtatagaatggcctggtttttttgaaatttacatgctataagcatgactgacctgggcctaaaggtgcagacctgttatcttagctgtcaagaggataaaggagaaggatccaaactcaaagcttccttaaacaacttagtgaaaccttgtctcaaaataaaaagtatgaagttggagcacttgcttagcaagtgtgagatgctggattcaatttccaatctcaaaagctgttcccattctaacatacccggcacaaacacaatgcattgcacagacatctaggaccctgggatgcatggttcaaagaattacacgtaatttttttcaagatcactaaattacttattcagcaagtattaaaaccactcttacagatacagtcctagaagctaggatttagtagtaaacaaaacaaacacaattctacctcacaagcttgcagaatggaacaaataaaaaaattaaatataattcacttttaagggtcaaatacatacattcttccatataagactgacataaacgctgtctgttttcaataagaggaatccataaataaagagtttgctaatttgatgactaaggtcgacagagtagagattttaaacacacataaaacaacaggctactggggagaaaggtagtatcttcaaggaactgaataaaactttccagtaagtatgatccctaaagcattcaggaccatttgttcctcagaaacttgaagagaaatcaataattaaatgttgtaacctatgtatcaacaacagaaatatctaatgaatatttgtgatgtttcaactctaaaggcaagatattaaatatcaaattccttctagtgtattctatattccatatagaatacaaagttctgtttcaggggtcaaagaaaaccaacactaggatgaatgaattaaagagaacaagacaaaaattatgaactcttactgtgatgaaatgtcagagatcactcttcaagaagaacgaaatcaaaatgggtaagcaaccatagaataaatacagagcacactggcataagtgctggattattactcaaaagagcccaaattttagtaccacacttgattacctagtcagataaccactgttttgtgatactgctatattattaagaaataaataattatgtgaacaatgaattacatccctgtggagcaaaccctttccatgaatgtcagccttgaacaaaaacttactttgaaaacaattttacacagaatttcatcacaagggtgatccctccatgtaaatgagtgaccaatgatgaaaaaaagaactttaaacagtgaaggaatacattctgtcatctcttctggctgggggttggtaaaatgaacaaaagaactaggaaatgaaggctactcacaaagcaagaccaggaattccccaaaggagcccctccccaaaaccctcccttgttcaaatcaacactcagttcctggctaaactcataagccagtaaagtcacatctccatatacacatacgagatttacacttagtatctgtcatgactacacaaatagtgtgggtactgcatatgggagagaagcctatgtagattgagaacaataatgactgttaaagatatccagggctcctgtttctgacagataactatgatttttttaagtgctgctcatgaatgtaggtgttgaataaacagcaaatttttctaccgcctcttacagtctgcctttgataggtaaggtggggctgtgtgaaaccttgctcaaatatatattaagtgggggggagggcagccacacacttatacctaccacttttttagcagtacaactatagggtttttttcctcagcaaccatttccaagttcattttttaaagcatgatatattattaaaatacatagcatgtaattaagtatctctgtaagtgtattcccctctcaggcatttaaacctaagccctttgacaaaccaaactcatagctgctgggaaacctcgagctgtcaaatttcaggcaaataagtttggttaacgagacctcaaatgccctgttcctagctaaacacaaacatatgaagactgtaaacaaaggaaaattaaaacccaggtctcagagaaaaatctctaaaatacatgtctttcctcttaattgtacactggaacactgtatatttattccacttgcccttgcttttcccttctcaaaaaaaaaaaaaaaaatcaaaaggcatcctttttttcagccatgagaagtaacagaaatgacaagggtggacaggcttaacttatccaattttcccattcccctggctccattcctctgaaacccaccttcccattctgccccttgccttctgttctttatgagtatttcatatttgcacatttacctcattggatttcaatatgaagacttaaggcaaagcaaggagacagcactggtaaccatttgtgattatattttgctcctgattgtaagcgatccagtacatatgagcagttcagtcccaaaggtaatgggttcctggagccagcagattgaatgccccagattacaaaaaaaaaaaaaaaaaaaaaaaaaaaacgggggggggggcttctcaaatctgaactaacaatgcaatatccttttcttagagaaatgtttgagaagcgttatttttactcgtacaaataaacacaagtgcagacatttttcaggcctgttcctgcaaagctagctgttcacgcttcctaccacaatggcttagacttatgtcatgcttgcttgttcgtgaaccctgatcgcttgattctgaacattctcgcagagataataatcaatataattcttatatgaaaacagatttttcttgctaacttcgtgttcactcagaatgctaggttgtcgctttttggttttgttttttttaaacgagattagaggaaaattttctcgcattcttcccgtttttcttggaacccagatggcaagatactaaaatgtccgtttgaaacaaaaggtttctgtttgtttccaggagagtaactagaggctgtgctggtttccagtagaaactgcagtgaattcaggcatacatctgggtcgcctcattaaacaaaagatacccatccgctgtcaacaaccacacagtacaaccctccctgatccttcatctttctccggaaggaatggtgcagaagagacgcctgtcaccatccactggccaagcaactcttgtggggtcgcttctctcggtggcctagtgactacagtagagcacatttgggctagccttcccgccccgcccctgcccagtacattagccgggtttctgtggggcgccggccgcggcttccacaagcacctttcctagcagaatccagtcctgagtctgctccccgtttccacccttccctctccaccccacaacgcgccacaatggacgctggcgggccaccgcacacacgccatcgcccacccgcgccgctcgcgcgaacgctcaaccgtcccgcagacgcggcgcaccgagctctcggccctgactgacaccgaaggcgcacgccgcggctccgcgctgggcagccccggccctcggcccctgtgggtgcgcgcgcgcgggtgcgggtgcgggtgccggccgggggcgcgcgcgggggggcagcggcgagccggggcggggggcacacgggcccgagggccgcactcacccagcagcagcagcttgagctcccgacgggcgtcgcgcttgtccctgcgcagctgccgctcgatctcgtcgttgatcctccgggcttccttggcctcctcgctcaggcagcacgccatgatggactccagagtcattcttccgaagtgcctcgctgcagccccgccggcgccctgctcacacgcgcgcacacacaccctccgccctcgctcccccgaggcagcggcggccgcggagccccgccgcccgggcgcgcgtccggaacgagctcaggggagccgcgggaggacgacagccgggcccgcagcccaggcgggccggggacgagcggggccggggggcctggggcgcgcgaagcaaggccgccgcgcccggccgcgctcacacgccgccttccctgggagcgcgcggctctcctggagccccgcgccgccgccgacgctgccctaggctgtgcgcccagcggcccgagttcatccaccgaggcggccccgcagcgagcgaccgccgacggctccgcgcgcccagcgcgtccgctcctcgccgccgcccgattcggctccgggcgccctcggcctgcccgcgcccactcggctcgcgcgcaaaaccgggcagccggccgccgcgcgctccccgcctccgcccccgcctccgccggacgccccacccggcccgattgccaggcgcgccgcggctgctcagtgctcgccctccccctcgccacacacacacattttctcctttctctgaactggagcacagatccgggagggagggagagagggagggagggaggcaggcggcggcgcggggagggcgggcgcaacgcagggggcggtgccgcggcccctactggacagctcgcgcgctgtttgctccgcccccgattgctcgccccgcccccggctacccgcccggctccgccgccgcctccctcccctcgggctgggccggggcgcgatggtcaccgccgctcgagctgggccggctggcggacaccgaccttcggctgccgcgggcctttggggcgtggtcggcgagaatatggcggtctcggcctgccctccggccgccggcgccgcgggagccctacgctgtgctcacgcgctgctcctcgggctaccctggaatcctgctgccctttcctatttctaaaacgccattgggctggaagctgcctcgagtggcctctgaccctagagccgtcttagaaaaaccggatactctgtactggggaagagaagcgatcctcactggctcgcggggatgttagcgacagatttgtggacggaactgtcctcggtatcttcagataggaatctgaatccagaagagaaaaaggcagctgcccgagtttccaagagcttcctgattgataggttccaacttttcgggtcactggagtgctttctgttttcctaccagcacactatgttaaatagcctagtgatacgggattgacccttgacagttaaggatgacttctgggagaatgccaagtgctacaaaattaagtgaacgagacaggtatgatggttcatgcccgtaagctccacatacagcaggctgaggcaggaggattgctacctgagcagtatgagacttcctatcgaagaaaagggggaggggagagaataaaaataggaaaaagtagagaaactactatcattgaggcaaaattctatttggtttttacacttctaatttgtggcagtttgctgataaataggaaagatcttgtttactcaaggtcctatttgggaaaaaagtgttcattcaaattgaatgtgtctcaacaacaagaggtgtgattcgtattattttcctgcctttatagaagctgaggccttcacattttgtgctttccgtgaactgctcctgttgattcaggctgcaaacctgtaaggccataacggttgctaccaattcagaacaaacagtattggacttcaaggtctttcctccagtttgccttattctcctcccccttggtggatgcacatattcactagctaagccaggactcagatcgagttgtggacataaaatctgtttaagttctgctttttaaaaagaagccaagaagacaaacctcatgccttttacatggatatcttcaaagagctggtagatttgctatgaaaagtaaagattcagtccataggcaggaatataaaatggcttcagggaggaataccaaatagtctctctctctctctctctctctctctctctctctctctctctctctctctgtctctcgtgtgtgtgtgtgtgtgtgtgtgtgtgtgtgtgtgtgtgtgtgtgtgtgtgtggaggaacacaaagtgctggaaaacaagatgatcaacatctcatgtctgatttcctaaggagcctgagacaaacggtgccattatggtgtcagtaatatgttttggcttaattgacctctttgttttgtcacttctgtgtcaacctcagggacgccttctggcacttaccagatatttaaattggcaaggcaatcaggagaagtatcactcactgggaagaaatcaggaagttaaggagcacaggataaagctatataaggacgtcaagcaggaaacaggaagagaaaattccaagcatgaacctaaatctatcccaaaccctttgatggtatctggaaatcacttgccaagcaaatatccccataacctaaatcaaacaagtgaagtccatacagaaactcattatggtgttgagtgtgttctaggtgaatagactctaaattatgcaactaaacagggctcatgttacaaaattccagctcattaaatcaacaaacaaggattaactacctgctatgagtaaatacagttaagatacagaaaggaaaacttgggagcctacagcacagtccttacactccacagggatgaaggctgaaggcataattgactctgagccaatgcaggagccaacaagacagaattaatttgtatgaatgttggggtggaggaaataatcctgtttggaagatttggacgacctcataggaaagaaacatttcaatgtaccctaaagaatttataggcttagcttggtgtgaaagtccttaggcctggctggaataccagtctggcccactgaaggagagatcctgatggaagaaaggaaaagacagagagaagaaaagaaaaagaatggaacaaagaaaaaatccataaagtggtgtatatacaccactttaaatagcaattccaaatcagaatcaccgagacagactgtggggtgataagccattctaagaactcaaaggtgattactatatggctgaatggcaaaccacaaagtcctagaagctctgaacttccaagaaaacagcctcttatctcccctgtgatatcccacgacagaaacctacccaacccatgcaccccaatctattgctcagcctttggggatgagaagaaaaaaactagtacaggcatattgaagtctcatggaggcagagcccaagagtaaaatggaaagactcttctgaaatgatctgaggaacaaaatcctgaagcagggtccagaaagcagaccatgtacaacatgcatcagtgtgtgtgtgtgtgtgtgtgtgtgtgtgtgtgtgtatgtgtgtgtgtgtgagtttgtagaccagactaactttggactcacagagatccacctaactgtagagtgctgagattagcagcattcaccaccacacccagcctagaacaaatattatttttaattcattcttattttcttttattttgtgaatgagtagtgttttgcctgcatgcatgtctgtgcactatgtgtgggcctggtgcctgcagaggcaagaagtgagcttcagatgctctggaacaagttacagatagttgtgagccatcatgtagggtactgagaactgaacccatgtcctctgcaaaagcagccagtgctttaaacctttgggccatctctccagccctaggacatgtatctttaaatgttgaataatcacaaggacgccaccacctacaccgctggcaaacacagcctttcaggcagtgtattatgccaggtgcctgaggcatacagagctattaaagactttataatctgcttgggtagacagtccacatagataaaagaataaagaatacaaaattaacagcccacgtgcttaagagaataaacaactcgaaagagaagtacttactactaactaaatgtgtcaagaatgacttagtcacacaattcatttggaggggtagtctcaggtaccgttaaaatcaaccagggagcaggggtaagcaacagatggggaacctaaaaagccagttgaaaaagagtctgaaacatttctgatactgggtcagctgggaaagagatgctgtgcaaaattgccagcaccactatctggacaagaaataaagaaggcttattccttaaggaaggtgacatttccctagtgcctgatttctctttagacctatactggctccctctattatggtatctcctatcttgctctcctctattcttcccccgactgagaaatcaggcactagggaaatatctggagatctacaaggatgacaccaactaacaatctaagcaacagaggagaggctaccttaaatgccctcccctgatgatgagattgatgactgacttatatgccatcctatagccttcatccagcagctggtggaagcagaagcagatacccacagctaaacactgaactgaactggaatccagttgcagaggaggaggagtgaggagcaaagggatcaagaccaggctggtttaacctacagaaacagctgacctgaacaaggtggagctcttgatccccagactgatagctgggaaaccagcatgagactgatccagaccccatgaacgtgggtgtcagtgaggaggccttggaaatctatggggcctcttgtaatagatcagtactcatccctagcataggaatggacttcgggagcccattccacatagagggatactccctaagcacagatacacgggggaggtcctaggccctatcccaaaggatatgacagactctgaagaccccctatggaaggcctcacccttcctggggagcagaaagggtatgggacaggtagggtgttagttgggggtgggagcaggggagaggggaggaagagggaactgggattgacatgtaaaataatcttatttctaatttaaattaaaaatggagaaaaataaaaaaggtggggaagcggtagaatcataagtttgaggccagcctgggttagagagttggctcagtgattaagggccagttgctatatcagaggaccagagtttaattcctagcacccatatggagttgctcacaactgtctgtaactttcgttaaggagacccaaagccatattccagactctgggggcctctattcacataaatgcacacatacactggatattatattatataaataatgtatctcatataaatacataaataattatgtatgtgtatataattatgttacatagaattaaaatatagtaaatgattttcaagataaaaaaaaaaaaagaaggaaggtgacccaggtcaaatgagaaggctgtaaatggcgccacctagggaaacattcctataaccctagaaagagtatgatgagctgtctagctgaaagcctttcaaggtcaacttgaagatgaaaaacctggcacaaagcagtctcctgcaagagaaaatacatatgttgcaaatccaaaaaaaatattcaatatgtaacagagtacctctgatatccttgctttaccaagccctgaaaatgcatgtagccaaacctctgtctttatccaaatataatttgtgcctgcagaagtatagttctttctatagaaaaggtctcactgtgttgctcatgcagttccagaactcctggacttgagaaatcctcctgcctcatgttcttgagaaacttggactcaaggtgcccatcactgtccccagcattgttgttttttgactcaggtgcttacaaaaaaaaaaaaaaaaatcgtagttagtttccataacttgaacatcaagaagtaacataggactagagatgcagataagttggtagagtgcttgcccaacactcataaagccctgagttcgatcctcagtcccccataaagcagacataatggcacatgtctgtaatcctaacacttaggaggtagagacaggagaattaaatgttcaagatcacccttggctacatagattgaggccagtctgagcttatgacaccatgtcagaggtggggagggtgggggaagaggaccaggaggaggaggaaagggagggggaggaaagggaggagggaggaattaggagaaaagaaaagaaatagatttcagttcctaaccaagtacttaaaaacccaggtccacagcaacagttctgatcagggcagtatatgtcccactgtgtatcccctgaacaagttcacagtctctttagtaacatacctgcctacctttgaccgttgcacatgagatgatgaatagaaagcagaaattctgagttaatgtgctagatgatttatttcccctaccttatttccatgtttctatgtcagatgattgattgtttatcccatctctaccgtgaggtaacccttctgtacaccgtgaatatatgttgctctcattggttgataataaaagctgctttgacctagagcaaggcagaatatagctaggtgtgaaatccaagctgagatacagggaaaagaagggtggagtcaggggcagcatccagagcagcaagatgtagtagactacaggtaaagccacaagccacatagcaatatatatattaatagaaatgggttaatttaaaagtaggatctaatcagcaataagcttgagcaataagccaaatagtttgtagttaatattaagcttctgtgtgattattcaggactgggtggccggaaagcaaaagcaccaattctgtttacacatctcctttaatgattttcatatacacttttaaaaggttaaggatttttttgtctgttttgttccctcctgaattcaataactagaatggcagcagagtttaactaatgcttaaaaatacatttatttattagaagaatcaaaagtagatgttttaatcaaagaaatcatacattggccacctgggagttggcccctcactaactgcccacaccacttagccatttggtacccatcagaacttgactttttctgtaaatattcctcaatccggtttgtcaaaacctagcctcaaatgagttcatcaagggaaatcagccatcattagggagtcaaaaacctggggaaactttcgttgctcaaacctagatagaaacatgtattaactccaagtcaactttgtgaggaagttgatatttctgccatgaacttgggtatatcttagatatcaagacacaatatatgatcaaagttcctagatgctcagtgtgtgataaattaatgagacacagaatattgttgatggagaacatttaagtaattaaagtgactgctatttgtcttctttgtgattgaaatgatcttaatattagcctatcaatagctattactttttaagagtttcatcctgccatagtaagatgtgatagccagtcaatttttgtttgtttgtgtgtttttgtttttttgagacaggagtttcctagacctctctctgtagactagcctggcctctaagtcagagatccacctgcctctgcctcccaagtgctgggattaaaggcattcataactactgcccagaagctattcaattttagataaatataaaatgacccatctaaccacaaaattagaaaaaaaaattctattttttatttcatgttttatttttttcccatttgtcacaacgaccaaaatctcttcaaggcacaaaatttctataagatccctttcgtaatagttgatttccagattatttccatcttttcatccttatgccaatttctaagaatgaaatttgtgatgaacccattgggcagtaaagcatgagctcaggaagcagtctctagtatggctcaacactaacatgatcctgcttcttttacatattttcatggtttgttctttatttaggtggtttttgcattaattcttatttcaaattcatgcattagaatattgtttatcttgattgaggtctctggcacttgaaattatgcatccagaacaaatcattgatcttgtcctgatcttgatttaaaacttcttggtcaggggctagagggatggctcagtggttaagagcactttctgtgctgcagaggacctgtgtccagttcccggcacttacaactggcagctaacaactgcctgtactccagtgtcagggaatccaatgccagtgtctggcctccaaggccactcacactcaatagcacatatactcacacaggcacacacatacacagaaaattttaaagtaaatccttaaagtcatcagtgaattgacataaaagtggagagtcgtagtcatttaaaaaaataagaatgatctatttcagaggggctgggcaatgcattcttcacagcttgaaaatgtatactaatgctgcttatggggctgaaataaaagaactggggtgaggaggctgtacaaacgaaaagaataaacctttctagaacctctccaaaatccacacggtattgaaaaaataagcaaaagcaaatgacgagaacatgtagaaaatacttagttttaggctcacttggcttccattaagactggctggggacaagcaagtagtggaacatgactgtatttcagctctggtgaggctggagaatcagaaattcaaagtcatcttcagctacacagtgagttcaaggccaacctgtgttaagatactgtcaagatagatagatagatagatagatagatacatacatacatacatagatagatagatagatatagatagatagatagatacatacatacatacatacatacatacatacataatacatacatacatacatacatacatacatacatacatacatacgatgatagatagatagatagatagatagatagatagatagatagatagatagatagataaaacaacaaaaccctaaaatcaacaatcagaaccaaaagcaaggactgtagggtaggaatgagctcagtggtagagtgcattctctgtgtgtaaagagctgcaatcagctctattctgccagctgcttcccaaacaactactcagacttattattaattataaatgctcaaccaattgctcaggcttgttactagctaactctacattttaaattaacccatttctattaatctatgtgctgccctgaggcttgtttacctcatctattaaattccaatgttgcttcttccacatctggcttgtgactcctctgacttcaccttcttcttcccaatgtccctagtttggttctcccgcctaaccttatccggtaaagctattgtcccatcagattctttattaaaccaatcacagtgacatatatatacacagtgtaaaggaacattccacattccccctttttgtctaaataaaaaaggaacgttttagctttaacatagtaaaattatatacaatgaaaacagttatcaagaattacggttacaatatctagtccatttgtatttggcaaatttagagaaaatactatcttaccattgtgagtctaaaattttatacctaatttaccttttatcataactaagaaaaactttaagcctaattatttaatctttaactccatgaaagaccccggaagggtaaaatattacctaatgacagggacatctggctgcctggacaatcatccaaagtccttctgtaatgttggggcatccctgagaagcagggaattttgtgggactatccttgtcttggcaaagtttagcagtcatttttttgcatcctgctggtctggtttggctactacactgtcagcaattgaggcaaggatagtttctttgaccaaatggttagcttttaccataaagaaagtaaactccatacagagtttctttgatgcccatcatattctttcaagtaaattggtgctgtcatgggcagacatgtctcattgtcaagaaaagccttatgttattgaaacattttaaatgccatattctgtaggtttttaaagtgtttgaagaccatctatctgaatatatctgtttaaccttgaaaacatacctattatgactacaagtttgattattgtagatgactaacaaataacatgtatttttcattgtatattttaaattagctgcataagcctgataccccaaacaagcatagaaacatacacacagtataacaaaaaataactttaaatttgtatcaataaaccaaaatacataccaatgtaaaatgcttgagattaatagtttggattaaagtatattcaacaacctatcttttatctcatcatttctatattatatcctccctttttttctgaaagaaatctttgaatctaactcctttgcttaattttgttttgctttaatcatgtccaataataatttgcaaccaacccctgtaaacaaaaacaaacatccacaaaccatcttttgggaatgtgggcattgctttctctagactgcttcctattgtctatgggtgttggtatctttggcagaaccttgagaaaatcaggataaccattaggtttcggctgaagtagtttgtgatgttggatcatctcagccagcagtcttggagctgttctgtgtacagaacgcttcatctgttgggatctgctgacctgtgcaaatgtgcccaagaagggatgtgtggattgagaaaagaaatgggctagagacagaagataaagttgggagggcatccagtgaatactgggatccgctctgccatgtttggattgctctggggcttggggaagtgaaggtattgcagatcccagtactccctggatgtcctcccaactctatcttctgtcttttgtctctttttcccccctcaatccacattctccttctcaggtatggaccagactagtcagctggactgaacaaatggaggaaaccacaacagatgcattttgagatgctggatcatctgaatcatttgtcttccttggtgtctggaccacttgttctgaaaataaatcaacttttaaaggtaacagacatatctgtattagtgcattataaactattagccaaagatgattttttgttttgtgtttgagcaggtaaaatgtgtgttatgtgttttgtaggttttttttttaggtttatttctttatgtctgtagttaggattttcagggtggtcttccttaatcaaactgttccatatcaatctggaatgaatccacagtctctggtttcctgtggaaataaaagcataacctctcccccaaagcaacataccttttgacttccattttgaattcaagatatttttaaatatataggttagtttaatctagcagctttcataatctaatgtctcttagcagccaaaaaatttaaagaccacaaaaaaacaaacaggatcctgattccttgtctatttccatctttacttggcttttttcttttatattactacactgcctttttaaggactttattattttaaaattatatatattttcttatgactgtctataccctttttttctctccaagcctttgtacatttttaaacacactgtaaccaatttagaggttttctggatatgtctttactgagcatctgtagccttttctgtttgtgtgagaaaaaccctaaacccaccatgcagcactctggcagagtgcacactggtggagcttgctcagccaggggctgggagacacagtggaacctatcttgcagcttagctcatgatgtgttagtgttggcaactgccaggaaacacatctttgtactgcagccagcatgagagacaccagactaagaagccacgtttgcctccatttttttgtgtttagaaacttttaaaaactttctcagatcttatctggatataggtactggatgtttggtcaccaccacatgaaaaacaaaggagaagaatgggaggcaggggtagtgtgtgttggggggtgggtggggagtgcaagaggagaataggctatacactagagagataagaagtaatgagatccaggaaaaattttaactctggaaattttttttcttataaataaagcttcatggaaaactagccagtctctacagggctaagtaaaagttctactgagtggaagagggcaacaagtggtcttcactctatcatcaggccatcttcaaaacccctgggtgaacttcagcatatttttagtaatgtttctacccctgggtattccaaagtgcagacaagattgagagcaacaacagagctaactatgagaaaccagcactgtctttaggcttcagtgggttggtaatgaagacagaatcatcaacccagctgggaagtaagtccagtcctgttgagaacagtggtgctctctggccccacccacctccttccagacctttagcaccagtatttcccttttcccccattgttttctttcttttttccttccttctttctttctttctttctttctttctttctttctttctttcttttcctctcttccttttctttccctcagtttcacccaagaagtcttctttcagttcctatcaaagggaactggtgtcactagttcctttggcagacttccagaaacatgtgcatctatcaacacaagtacttcttttagatcagtggtaggctgcttgcctagcatgttccaagccttgagttcatcctcagaacaataataataacaacaacgaaaacaacaacaaaagttacctgaatgctgtataccattccccttaatccgtaatttgttctccctcacaacatatcagggataggtctgtcaagcactacttttctgttattacatagtgtcctgttggagattgtctttttcttggccagccctttgtgaatggttatttgttcctagaactgcactgcttttgttataaatatttatgtatgtgccttgtttgttgctttttgtgaatttttaatttattaatggtgctttaaaaataaagtcagtggccaggcgtaggtggcacacgcctttaatcccagcactcaggaggcagaggcagaggcagaggcaggccgatctctgtgagtttgaggccaccctggtctccagagcgagtgccaggataggttccaaagctacacagagaaaccctgtttcgaaaaacagaaacaaacaataaaataatgtcagtgtcttcttagtgttccactgattaaatttataatctgtttaaacagtactgtattcaaaatttatgttgtttcaaatttgttttcatggtgaataatactgcaaaaaaaaaaaaaccacaaaaacaaaacaaaacttcctcatatgtaattctacatatataactccatgctctaaaataaacttcagggaggagaaaatcagcaccaacatatgaaatcttcttcaccatctttgttaaatagaaactgttgattttaagataatgtatgtggtagtttgaatgagaatggcctgcatagtctcatatatttggatgcttggaacctagttagtgaaactttttgggaaggattatgaggtgtggccttgttgaaggaagtgtatcattgggggtgggctttatggtttcaaaagcccatggtattcccagttagctctctctctctctctctctctctctctctctctctctctctctctctgtctccatcttcacctccatctctatctctctatttctctttggccccaccttgaaattaagaaacacactctaggctactgtcccactgccatgactgtctcctgccatgccccatgctcccctccatgatggtcatagactcaccctttgaaactgtaagaaatcccccaattaaatgctttcttttataagctgccttcgtcttggagcttctttacacaattagaaaagtaattaagacaatgagttaaccaaggaataaaatcattgactttttttctaattataatattgaggttttccttcatcattgtaaactacttgaagaattcagtaatttcagacatttttataaacctgcacatctatccataaatcatagtgatcaccatttttactgaataaataacagtatgtccaaagctgataataagaaatcaccagtctttttattttaaggagttttcataaaacctaccattccgtgaaaagtcttcctgatagaccttctaaaacagggcaggcttccttccaatataaatccaccagacatcagaattgaagtatatccttggtttcttctgtatggagttccaaaactttattctgccaatgccaaacacccttttaacgctctgcatctagaaataaaactttcccagagcaaataaaaagtctcccagttaagccttctctttcagccttaagaaaccaaaggaaggatcagtttatttggcttcaaaaggattagacctcagcactgatattttgcagagatccagggaagaatgtcaccaattagtcagaaaaaaatgtgcatcccaggaagatatggagtcctgtttattattccccttgctatgtcataagctacctactcacttgtgctcatagggaaaattgaaaaatacagaacctttaaattgactttaaaatcaaactccagattccacgaagggaaagcaatttcccaggaccctttcaacccattccctgctgaagtcttcctgaagtcatcacaccccacttctcctggactctatgttctgccaagtgattagcgtggaaaagtctggaatcactcaactgcccctcagtcacacttagaattaaggggaattaacttagaattagcttgcaaggatttttagtaggacctgcccagagaagtctggggcacgtggcataacgggaatgacagagacgattgctcagatgcctgcaagctctgcgttcccatcttagccatatcactgcaccaaaggtgtttacttcggggtacatctttccatagggatgggcacaagactgcctgttccagtcactgcagtcccagaactacaggctctgagcttccaagaaaggagaaggaaaagaaaagtcatctgaggattccataatggttctcatttcttgatgaaggatattacaggactattatttctctaactttcagatgtaagagagaggctggagtgttggttactagctcccccttcagacatgctacaacacctcgccccccatggttctgacaccctcttctgttcttcacttggacacacatagccacacacaaacacaactaaaaacacaataaatttaaaaatgaaatctcaaaaacattaataatccccccagaattttattatacttgttcccaggaaaacatttctgaatattctgttttatatagtaattaatatgtactggttttcttaaattttcctccgaagggctagagaaatagctcagtggttaagaatacttgctactcttgcagaagacctgggtttggctcccagaaaccacacacagtggctcacaaccatgtgtaactccagtccgattccctgttctgccctccaatggaaacaggcacacacacagtacacatacctacatgtaggcaaagcacccaaacacataatttttttaaatgaagaataaaaactgctatgaaatagataccatgctcgacagaggagatagggcagtgagctctgcaaagtaaaattaacttgaggctacatccaaagaagagaccatgtttcttatcatagtgcagttcaaaattataaaatattatttacttttacattatttatgtgtgtgcatgtgtgtgcatgtgcataccatggcccatttgtggcagtcagaggacaatattgaggagctggtcctcccttcgaccttgcaggttctggggatcaaactccagtccacaggtttgactccaactacccttactaagccatcttgaatgccctcatgagaaagaaaattgacaacagtaaatgaaaaaaaaggtaagattcaaaaatgttatttaacctaataattccatttttagaaatttatctgaatgatgttatcaggttgtgaaaagtatttatttgtatggttattcataacagataaaacagtttacacaaaaatatgcaaacaagcccagggtcaaatattcaaggattggctaaaagccagttgtggtggtcccagctgacaggatatacaggattctgagaatcagctaactatattacattatatccacatgaaaaatatgaagtaaccatgttgcatataaatacccaataatgatggaaattgtactgtcaaattaaattatttgttaaacagaaaggcaagtattaaccaatgtgaacaaaatggtccataatgtttttcaattttctttcttccttttcttttcttttttaagatatgatttcactatgcagccaggttggtcttgaactaaggaacctcctgattcagatatgaagaatatgcaccattatgaaagattcaaccatctgggggagtgcgaattgcacagttgtgctagaaaccattaatagctctatctccaaagaccaggatgttggaggtggtttgtgcttcctgttggtattgttattttcatgcttttgagacaggctctcaccatgctgctcaggctggtcttgaacttctctggaataaagtgaccctccacccctgaggcccatggcaccggaactacaatacaagtacatgtcactgtacctggatgccattttgtattttagtttaaaatgaaactatgtgaaatttgagaaaatcttgataattaaattataattaaataattaaataataaatgcatttcaattgcatttaattatttttattttgtgtgtatggggttaagggacacatgcatgcatggcacatgtatggaggcctgaagactacttgcagttctgggtatctcttttcaccttgaggggaccagaaattgaactcaggtcatcagacttgggatgatgtgtcagttagaagtgcctgccatgcaagggttaggacttcagttcaaatttccagcatttaagagctgggctgagtggcacatgtctgtaagcccagatctggaggagcagagccatctgaatacctggagctcagtggctagccagcctaggcaaatcagtgagttccagggtcagtgagaaaccctgtcacaaaaaaaaaaaaaaaaaaaaaaaaggaaaaaaaaaaacctgaggaaagtgattaaggaaaatgcctaattaagcctctgtacccctcccgccaaacacaggtcctctcacatgtacattgtccactatgcacatgtactttcccatgggagataagctgcatctaagctatgggtcaaggatagttaagggaaggaggacctgctgcagctcaggccaaaccactcctggcatctgcctgactccctgaaaatctttcaccctacacactaaggaatttccccaggtacagtagttggcacataccctctgctgctgttgccattgtttccaccgccattgtcaaggcagccatagccactctgccaagtatttgtaatcattgctgccaaggcaccaccagcaaaccatgaagggaaccaggagaccctcgctgccacccatgtgacccaatacacccacccatcacagttttcttcctgccaaaactactgccactgctaccacacaactcccaccactaccactcctattggtgttgggcctgtggctagccaccccagccacccatctgcaggctggggtcagaatggtctccacaaatgacccatgaagaagcagcattgtgaatgtcggagagaacaggctggtaaaacaaacactatagacctgggcagagtagcataaaaatgtgagagcacaaactgtgtccaagaaacccaggctaggctcccagtcagagggaatgggccccatccctctacccctgccacagttggagcatgaaaggagcgctgtcctttggagcccaggtctctgctgacatacctattctggtgggcagaccctctattccctttgccctgcctgcaaagttccatccttagaccacaaaggacaagactctgagggaaggagtttgcatctggaacgtgtctaccctcacagacctcctcgtagtctggcagggtgctctgatttaactgctgtgagttgctgggactatcagtcctcactgccacccgtggagactgttacacatgatggtcccagggaagggagctgccccattttctcagggactacttgcatgcagagcaaaccttctgctccatggcatgacattttctattttaagcaaaataaacacacagacgctatattaattattaaaatgttggccaatggaaagggcttctttttggctagctctgtcttaattattaacccattactattaatctatgtatttccatgtggtcttggcttaccagagaatgtcttggcctgttactctttgtgatctacatggcatctgtttctggcaggctcttctgcctacttttcccagaattctcctcatctcctcaccccacctatctccctacctctatttgccaaacagttttattcatcaaccaataagagaaacatatacacagaaggacatcagcaaattatatttactgctttgtgggttaatagttatattactgtattttaattctaccaaactgtaaaggacattcatgactatcttttatgtatctctacctacaaaatcttctcttatttacatccacaattgcccctcaataacctcttatatcttaaatctttccttcttggtctattttacacattctatctcttctctttattctgtcttcactttaccaattaaacattgataccaaacacaccaaaaaaaatttatggaaggacaaaaaattagcatacaaaagttagttgttacttatgccaatgataaacatagtgagaaagaaatcaggaaaacaatctcaatctttaaaacctgccatggaataattctaaccaaggaagtaaaaaaatatagacaaagaataatccaaaacaccaaagaaggaaattgaggtaagattaaaagacctactgggcttatggattggaagaattaaccttgtgaaaattactcttctgccgaaagcaatctacttattcaatgtaattgccatcaaaattccaacattgttctccaccaacacacacacacacacacacacacacacacacagagagagagagagagagagagaatcttaaaattcatactgtagtacaaaagacctcaggtagccaaaacaatcctagaccaaaagaataattccaaagatattgccatgcttggcttcaagtcacagtgcagagcaatagtaataaaaacagcctggtgctgtcacaaaatcaggtgtagattaatggaacagaatgtgggactcagatcagacataagcttacacagctacagccatgggatatttgacaaagatgtcaaaaatatgcattgcagaaaagataatatcctcaacaaatgttgttggggaaactgaatagtcatatatagaagaatgaaactagatccatatctcttaccctgtacaaaaatgagtccaaatgaatcaaagactccaatgtaagaactgacactgctagaggaaaaactaagaaaacacttgaatatgtaggcataagtaaggtatttctaaataggattagagtcatttaggaaataatcccaacaattggcaaatttaacctcaagaagtaaaaacaaacaaaccttctgtaccacaaaggaaatagtcaagtagaggcatggtatgaatggaataaaagctttgccagctattattctaacagaagattaatatccaaatatacaaacctaaaacatctaaataacaaagaaacaaacagcaatcagaagatgagatagggaattgaaccattctcaaaagaagaaatataagtgcccctcaaaaatacattgtaaaaaaaagtgctcaataaccttagccatcaaggaaatccaacttaaaactgccttgaagttccatttcattccagtcaaaaaggctatcatgaaggaaacaaagaacaacaaatgctgtcatggatgcggagaaaggagaattcttattcactcttggttggaggttaaatttacacagctattatgtaaattgtgtggaaattaaaaaaaatagaactttcatattaccaaaagactctgccttagcattctatttctattgttgtagtgaatcaccatggcccaaagcaagttgaggaggaagggtttgtttcatttatacttccacatcatagttcatctgagaaagacagtcagggcaggaactcaaacaggacaggaacctggaggcaggagctgatgcagagaccatagaggggtgctgcttactggcttgttctccatgacttgttcaatctgctttcttatagcaccttggatcaccaacacagggatggaatcactcacaaagggctgggccacaatcatcattgagaaaatgccctataggcttgcctacagcctgatcctatgggggcaatttctcaactgatgtccctgctccagtcattgcccacctccctaccccatggctctagcttgtgtcaagttgacataaaactagccaggacaacccttgtaatcttatctcagggataattgcacatccaagtttattactgttatattcacaatggcaaggaaaatgaaaatatagtaatacacacagtgggatttttatttagtcattaagaaaacttaaattaggaaaatgaatggaactggaaaatatcacactgagtgaagtaagatcctagcttccaatgtcttttttaatgttttattggggggggttagagacaggacttctttgtgtagctttggaatctgtcctggaactcactctgtagaccaggctggtctctaacatacagagatccacctgcctctgtctccccagtgctgggattaaaggcatgcaccacctccacccagccccaattctaaattcttaatagagagttgtgactggcctattgtactcagaagccactggcttcagaaaaagaacaaaacaataatattattaattggctcatgtggttgaaagtcagaaaggacagtttcttcaaggaaagccagggaaacacacaaccaactgtgccctggagaaacaaggttacagatgatgaaaatcgtatgtgcttacatctatgttcagtgaatgtaaaagaggagaaacactcagagaaacagagctcattgtgagaggggagctctcccaaaagagtctatgaaataatattctcacaataaatgaacagtcctcctgaggtgccgtccctttaatattttggaaccaccaatgagtcttgatgagttggcaaggataccatcaacacttcttcatttaacttaaggaaatcttcagggcgtgacttggcctggtggagcttgcaatctgccacctgtatgaaggcagccaattcgttagcaactgatgctactgagaaaaggctctagaagggagagtctatagcgctgtatccaggaagcaggaagtacctccacatggttgtataaggatgcaattttactgtggtgaccaatctcactaactagcaataggtgacaagtaggtgaaaagtctctacccagtgcagagcagaacagtgtaaaagaaaaggaaaataaagttaattaactccttgtctttccaaccatctttgtaagtcaacttttcattcagaacatcttaagtttttcagaggagctgcaacagactagagatttccccaagatctgaaagcaagtgtttctacttcatgtctgtgaatgtgccatctcccgtgataccgtggcccctgtttccagaaatgtccatacaagattaccatggaactttccctatgctcattccactcctcaaaggatttttggtccacatcgtaaaattataaaacttctaacaatgttttattgagtgaggaaatgcatcagaatgagcttctttgtcaggaagatgtccatgtggcccttgctttgcagaactgttccaagctgttctgtgtttctcaagggtcccaggtggccatgtgacaggcatacgtggctgtagtaaatctgatgagcaaccctctagtgtttcataaagaaaaggcttgtggtctagctattagatatggctgtgctgccattgcctccatggatggtatacactggaaagagccacttctccataatatcacacattatctaggacagctgtcactgcattacttctgagtaacaacttcaaaactctcagagccatgtaaaaatatcactcttccttccttcacgcctccctaccttcttttgaaacaagtcttagtgtatagcccaggatgactttaaattcatgatcctcctgcctcagtctctcccatgctgatactacagatgtgctcaccacacacagctaagcattcatttcttgctcgtctatctggaggtcagttagccttggctaaggtgtgaatttatattggtgtcatctgggataggtaccaagtcacaaactctgtttcaagcctcccccagcccccccacctctaaaattactaaaagagcaacagctgtttaggacgtgtccttcctttgtgtaagtgaatggtagaagttctagaaggctagtaagagttgcaagatcccagctagatgctcagcttgttactactgcttttattccactggccaaaacaagttctacagccaagttcaacattcttggagcatggaaggtacagtctatgaactacaaaggcagagaacaaaggcccatgagcaaagaattctgtctcctacagtcctcctgcaagatgaataggtgcttttaaagccaaggtgaactttgggaaaagggagaatgggaatctggcttgttctttcggagaattgaaaattagtaaagttttatcaggatgaacattcaagcaaaagttatgtgcaaggaaaaacaaatccctgtatcaaaaagagaagggaaatcaacctaaggacaaaaataaacgagatcaggtagctaattctatgcacacacttgacttctaatacaacacttcccaaatactgtgagggccaatggacaattctttgtataaaagaattatattaggatcatggaactatactgcatcccagcacagagcaaggctagtgataggggggcttgaacataatgttttcacagtaaaacattttttttttacagttttcactgtaaagtatggagattctaaatgattttctctttctactttagaccataataagcaaagctgaccccttagccacagaaagcaccaggccacttggatccttgaccttaacctgagggacttggaacatgcaataaatggggaaattcccttctcagaaggccgatagtataaacaacctaagttattttgcatgccacactagtcaccttggttaggtggaaataaataagacattgcctctgtcctttagaggtttgattttgatggaaaacacaaaaatattgagatattcattatgtcttccatctcctctgctttgtagttttaagataggatctgccttccccttgagcaatgcttgtgcagcaggctgaatccgagacagagcatcggatatcacaaattccctcgaagttggaaatttgggtgtctgctgatgtaaaacatcagctaggcctttgcattatcacacagcaagcggaagtcccgtgagcttaaataagtaaaaacctgatgtttcaaactgtagagctcctggcaaggccgagggtggaggatagaccactaatgataattactgctgttgtgagagtaggcgagtcaccattttacttcatgatctaaattagtgttttaacatcagtcagacagagatgtgtgaaagtaaaggagaccttagtgtggtccccagctttaatctagatgttgccaaggccaagccaggcaagccccgagaagtgcctaagtcagcaggaactcacatcttttgccaaggagcttacaagctactgttttctccaccttgaaggactgactttctgcttggactgtctgattccactcagagttctggctggtactagagtctcaggcccagttccataccatttgcctggcccctcctgaggtgcccatctctccccagctccctctcttcagaagtgacttcagttttcacactggaaacttgtgagtactggccagttgacactttgaagccgtcagggaaacctcttggccacattcttggcttgaatccagactgaattagcttgacactaatggtttgcatgattcacctttattatttaatgaattagaagagtcctttcagaccagaatcagtaccaagtcccaacagacatccaaggtttcctaccaaagttgaaaaaacaatatatgtgtgtgcccacaaagaataataaaactatctctttgactgcttgtggcaaggattgttttttgtccaacatcttagcacggctgcagtggttgccactactctctgagttccctcatgtcacctaaggatgacaaggtaaagaaaggcacccaaaagtcaaaaagaagaagaagaagaagaagaagaagaagaagaagaagaagaagaagaagaagaagaagaagaagagaaagaaagaaagaaagaaagaaaaagacccagtgaataaatctgtgagcaaggcccaaaagatatattcagactttctttggactgccagctcccaaataatgacttggagacttcttattaagtatgaaagcttggccttagctagctcttaaaacttaatttaaactaacgcattttatattaatctatgttctccatgtggctcataacatcccagcactgtatgtctgacttcctccacatcttgctggtaaatctcctgcctcagactcttttccatgagttcctatctctgccctgaagttgttgatggagtttctgtcacaccaagtcctgtagctgtttagccccaaataagcacaaggaggcttatattaattatgaactgtttggccgatgactcaggcttcttgttggctggctgtatcttaattattaacccatttctattaaactatgtattgccatgaggctgtggcttacctgtaatgcttcagaatgttattccttcagcagctatattgcgtctctttggctgctctctgctcctcttcccagacttctagtcaggtagccccacatatacttcctgcctggctactggacaatcggtatttattcaccaaccaataagagaaacatttattcacagcatacagaagaatatcccctatcatctcttcttttctgtctaaataaaaagaaaggttttattttatttttggtttttcgagacagggtttctctgtgtagctttggagcctatcctgatactcgctctggagaccaggctggcctcgaactcacagagatccgcctgcctctgcctcctgagtgctgggattaaagacatgagccaccaatgcccagctgacaggttttaattttaacatagcaaaattatatatatcaaaacagttgtcaagcaaaactatagatagcaatatttagtccactaacatttggcaaaatttaaagaaagtattttgtcatctatcctatctttgtgagtctaaagttttatatgtaacttatctttatcacaactaaggaaaaccataaccataactgtcttcaactccatcaaagacctcagaaagacaatatataaactctagaattgacagagacatcttgctgtctggacagtcacccaaagttcctctgtaatgttggagcatccatcttcagactatacacctagagtgtctagcagacttctcatcaaagcatgaaatttgaaactgtctgcctgtgttggcagtttgtcagtcatttttctcctgcagaatgtctggtagactcttccatgaagcaggaaccctgaaagactgccccatctttttttggcaagtttagcagtcacattcctgtgggtcctgcatgtctagtttagacagcatgctttctagcagtccaaagaaaagcagtttcttgtccaatagaccagttttgtcacattgaaggcaaactccataatgagtttctccgatgcccatttcctctctgaagtagttggtgttgccaggaacattttaataaatcctctctgatgtgattgttgctgctaggagatatgatttattttcataaaaaaccttataaatcattttaaatgccatattctgtaggtctttgaaaggttttgaagaatgtttatccatttgaaatatatctctgtatacctagaaagcctaactcacataagttttactattatagattactatctataatatttatttaagtatattttatattttaaatgagctctttactataatatctaaacaagagtaacaatatacaagtaacaaatttggccttaaatttgtatcaataaactaaaatccatacaaatacaaggtattaatttctatattatagttttttagaaagagattgactgtgatcattaaccacttataacaaaacccatttaaatgaaagcaaacatttatcaacaatattttagtgggaatgtaggtgtagttttcttcaaactgcttcctgctgtttgggggcgttgtaaatctcaagagaatcctgagaaaacccagaaacctggccatatcctggttgtagtagtctaaggctacattgtctcagctgttttggatgttggatcacctgggccactgcttcaggggatcttgcttgatcaaagcatagtagtcgaagatggaaccacagcttttcatcttctgtggaaacaaaaaaagaacctcttttccaaagtaacatgtccttagacttaaattttgaaatcaaggcattttcaaaatacataggttggattaatccagcaacatttataatcaaatgtctgtcagcaactgttgctcctttatcagcagtcaaacaattcaaagacaacacagtaacatacagtatctagactctgtgtgttttccatctttacatggtgtttttttattactctatttctttcatttttattttttgtttttttgagacagggtttctctatgtatttttgactgtcctggaattcactttgtaaccaggctggccttgaaaccagagatctgcctgcctcttcctctcttcctcccaagtgctgggattaaaggaacgtgccaccagctactctttttttttaaaggactttctctatcccttttcttttctttcccaagcctatgtatatttttcaacactctgtaaactgtttagactttatcagtctttactgtatatctatctttttctgaccacatgagtctttaatctgttaaacagcatggctaagattaaagtggaagctttgactaaagccaaccagttaggctttcaaacatggcaggggtacatttactgccagttctgggagttgtgctcaccaccttgacgttggtccatgctgccatcaagcaggttgtagaacactgcccataaaccttttgtatctgtatgaaggacatcccccatcacaaagtcccgcctagcctctcctgcctagctattggctgttcagaagatgccttaggcaagtgacgaagggtatagggcatcttcacacagtgcataaaaagataatcccatccaaatgaaggcatagtttgatccaaccccagtaaccatgtcttacttaacatggctgcttatgggagtcctggaaagaaattcccaattgtaagcttagaactcttgggatagcttcagaaagatgggcagcatgggatttggaggccagaagccccacagcagcttcttagcaaagggcttagcagacctgtgtcaaaccagagcttaaagaatttaccaggagccatctgagcagctggtgaagatgcatcaagtcaaccaaccgaaaacacatttttactaaatctctaaaaattattttatgtaaaacaaaaagataccgacagttagttctccagtaccctaatgccgaattatcagaaatgccagaactctaaggttcatgcatgtgactgtattgctttgggcttctgttagaacatttattggaatcctgagaaatcagaatcccaaagaacataagattatggtttgtttttcaagtttctaaatttccacggtgtacaatcattttataagctacggtattacagaaggatacttccagacaaggataaatagtctgagcatactccaaccatatttcccactgtactcttctcccacctccttcccagcggcccacgtcacccccgagacaatttcacatcacacacacatacattatgtatctgtagaaagtctaagctctacatatgagaaagaacgtgtgatatttgtctttgtgtatgtgtgtgcatgtgtgttcattgcacgtgggtacccaagtgcaaaggtgtgagtgctcatgagggcacatattgagggcatctcatttgatggctctccactttatttactgaggtgggcttttgcagaacccagagttcaccggctggtgcagctcagttagccagcttgtgctagggatcccttgtagctcccttccaagagctggaattacagggagtcacagccgctatgtgagatccgggaattcaagctctagtcgtcacacttgcacaacaagtgttttatccagagccacgtccccagccactgatactagtttttctgagacgacaaatgtccttaaaatgatgatctccagtttcatcaaagggacaaaacttgattcttctaaagaattctaacaactttccattgggtatgtataatatacactgtctctgtccttctgttgctggacaacctaggttggttccatagcatgactaccgtgaaaagagctccaatagacacagtgtgcaagtgtctctgtgacacatggaattgggatctttcagtaaacacccaggagtgggggtatctgggccaaatgggagatgtagtcttagattttttagggaatctccaaactggtatccctagttgatggtcagttcattttcccaccagaagcgtataaaggttcctgtctgtctacatcttcaccaccatatttttcctaatgactgtccttccgactgggtgatacagaatttcagtgcagatttgatttacatttccctggtacttagtgaggttgggcattttttaaatgtataatgcatatttgattttcatcttgaattcctggaactcatatagcagccgtctgttcattttattagcccatttactgatggtaattttttaagtttcttttagttttttgagtgctttgtatattgtgggtgttagtcatcatgagatggagagctggcaaaggttttccccatcatacaggatgtctttttactcagctcttcactttgatgttcagtgatttttgattttgtgaggtcctgtttatcagctgtaggtctcattttctcagtagtggcagtccccatccgtacttactcttctatgttgaagtatcttccctacctttcctttaacagtttcagagcttgggggttttcagtcagcatttgttctatttgggattgatgagacagggacctagtttcattcttctacatatgggcatcactttcccacctccacttgttgaagggactttgttgaagtctttttttccactgtatatttttagcatctttgtaaaaagtcacatggctgtagctatgtggatttgtatttgggtcctcttttcatccccattgatctatatgtctgtttttgtgcaataacatgctggttttgtatctagatggctaagtagcctaaattagaataatgaatgatgatgcctatggcattattcttttcctcaagattgtaattactacctgaggtcatttgtgcttccatatgaattttaagatttttttctatttctgtgaaaactgacatagaaatgttgttggaattgtctttaaatatttagatagcttttataaggatggcattttcacaatattaattcttctaatctgtgaatttaggatgtctttccatattctagtgtgtttttttctttctttagtgttttaacattttcattgtaaaggcacttaacttctatagttaggtttattccaaggtattaaaaggtttttggggggttgtatgtgtgtgtgctctgtgtgtgtgtatgcgtgcacgtgtgcgtgcagtaacgggggataccgtgtagcatgtgtggagatcagaggactttatggagtctgctttctccttccaccatgcaggttctggaatcaaactcaagttgtcaggcttctgtagacttgcttttatccactgagccatcttaacatctctccaggatacttttaaaaagcaattgtgaatgtaattatgtccctgatttctctttgtgtgtgtttaccattgttgtatatgaaagctactgatttgggtagaaattacccagaatgttgctggaaatgtttaacagatctatgagttttctggttgaatcttttgaaacccttatttatagaatcataccaacagcaaataaagacattttaatttcttccttttctatttatatcccttctatttccttctcttcccttaatgttttggctttaagcactatcaaataaaaggattttttttatttgattgttcccacttatactaaaatgctttgagttttttcttatttagtaaaatgttggctataaacttatcatataaagtctttattatgttgagatatgctctattcttagtttctttgggtttttgtttttatcattaagtgattgacattggggttttttgaaagtctgtgtctttgatgggtcttttgctttttatccttgagttcatttatgtaatatattacacttcctgatttcttcatgttgaatcatccctgagtctcataatgaagccaacatggtcatggtggatggtattttgatacattagggcaatgagtattcaattttcttttgttgttgtgtctttatctgatttcagatcaatggtctcataaaaagtttggtggcttctttcattttctcttttaaaacagtttgttgaaacattggtgttactttttaattttttttatatgaatcgataatgtattttaaccccaactcctcctcctatactcttgaaaccccacaacatgtgtcgttcccacctttaatgttcttttttaaaaaaaataatccataataataagtccaattagtgcagcctgcataagcatggacaacctaccagcagccacactcctgaagaaaaatgactcctcctacagcagccatcaactgctaatatctacttggctcgggtaggggtttcatccatgctggaattattgactggtttgctcttgttaaggtatccatagctcctgtgagttcataataactacaacaatagtgtcatgaaccgaagatagcattttgtaataatttccccatcctctggctcttaggttctttctgttgccatcttctgctttgttccctgagctttgtgagggttatcctagctatgttccttagggatgagcaccccatagtcatttattcttggcatttgggctagttgtgagtctctgtattgactgctgttcaaagcagaaagaagtttctctgagcaaggttgagagtagtactaatctataggtacaaacacatatttaaaacgtagtttggtaatatatgtttagcaaaacagcagtagtatattccccttccagaggctatgacatctccagctaagggcttttgaccaggtttacagtactagatgaggaattccctcctatggagcaggtctctaagccaagtagaaaacattggttacccccacagcactcataccattattgcacttttggatacatcttgcctagcaggtcagtattatagtgtgtaagagccacagctggataagtctatcattgacttttctccccctgcagcctgcagagtacatctcagtactttgaaagcaagccagcaaagaggacatttccagatcagttccagcttgatttctttatgtgctgcaaccaaaatgtgctgtgtcttcaccaatagggtctaaccaattagttacagtaaacaaccagaggaatggcagtagcttgtattgttttgtgagactctggggcctccctgatcaacaactcatactggggtattccacatctagcactgagattctcatataggaacccatgttttctgtggcaaacactatcctcccacatagggtacctccattcaaactagggtgggtggcccacgagtcccagcaatctgtttctactccccagcactggattacagactcactacaccatgcccagctaccacgcctgatttttttaacatgggttgtggggatcaaacccaggtgttcatgattgcaaggcaagaactttgccaactgaatatctttccagcttcttgaaatagagttttaaaaagaaaaagagccagtatccagatcctccttcagtttaacatgtgtggagatgagtcaactgattgagatcaggaacttgctacgagggccttgactccatagaaaggaagggagagaagggagaatgcacatctatcccggaactgtatagattagggacctattgcctaattcagtggccaataaatattgggcagcgtgaatgcatagaaactgtgggtgaaaagcaagattgagagcattaagtaggagacaagagacagagctaagaagtgaagctttggcaccctagacaggcattcagcatctcctttcctgcatttccacagtcatagccttgggttctctgctccttatctctctgaaggattgatatagaaacctggagcccataacctcaaactgggttagaggaacccacccaccccatacctcagagcaaaataactctctgaggcctcccagaaagcacagcccatggctttgcgtgcaccatctaacaaattcatgtatgcaaaagtagagggagagtgaaaagaagggactgggaagtcacattatttaagatgattattaaataaatccctttgtgctgatggtgaatgggtgggggagcccaaggtgttcatttactttgttaatgttaagcaataaggcataataaagatattgtcctttcttgtaatgatttaaggtgtcacagctttcaaaaggctcagttgagcataaactcagctagggctacttgtactttggctgtcttaagttttctttctggactaacatctgactatatctcaccccagaagggcaccaaccagggttttattaaaccacattggaccactgctacttctgtttagttaagccacactggacagtgcagcctcatctctgtggttgtgtgtggctcatagccactcagacatgacaaaagtaaatgaatttaaatcacattggaacaaaggtgtgcctcaccaaatactggcacacttaaaggagaagtgagtgtgtgcacacctggaagttgttagcaattctaccaagcaaaaccttttactagtattttatggtttgtattgctgtgaagggacaccatgaccatggcaactcctataaaagaaaacgtttacagaggtttagtccattatcatggtgggaagcttggtggtgtgcagacagacatggggctggagaggaactgagagttctacatctggatttgaaggcagcagaaagagattgtgagctactagcccgacttgagcctctgagacctcaaagcccacccccaatgacacatttcctctaacaaagacacacctacttcagcaaggtcacacctcttaatagtgccactccctgtgagcccttggggtggggggccattttctttgaaagcaccacagctggccatgtcagcttttcagtgtcattttctcccccatccgggcatgccatttactttcacctcatggacacttgaagccttggctaaaagctccattccccgcctgccatgtatttggcaactcctatctgcaacctttcctcttccatgatttctagaactttgctttgataatccactcacaggccttttcccaaaaatttgctttcctcatttactgtctcttcctaaaacggcttcttttaatttctcatttaaggcactgtcatttttattaactacaatttaaatagtgttttaaaagaaagaaagaagaggggaaggaagaagaatggaagaaagcagaaaaagaaaaattagaagaggaggcccaggatggagaggactggggaggtggtctgtgttgagaaacaaaaggcctttttaaatgtaacctttagattcctgtgaaattggttgagtcagctgaccaagcatattgctttccaagctgcagttcttcatagttcacatgtgtctacaatcccttctaacatacctgaacttgcacacagcccagggccacaaaaactgaccccaaggttttcttctgactacttcccagatcacaaatatgtctttctcatgaaaaccctggttggtttgtgtgaatctctactctggctttatcatgatgagaacttctactccacccaggcctggcttacgttgtaaggcatcctaaacttcttttgtgcaggccaccatgctctcttcatctccagaaataggcagctagcaggtttctgggcagagcaattcactgatttggaggtgtatgtgttccccccatccctttgctcactcaggcaacatggactgtgtcgcactaaatggaagggaatctagccaggcaggaggacagatatgagtcattgtttgaatctgcttttcaaagatttttttgtctcaccttcttcctctggcagaacccactgctcttatctcatttcctctaccattctctaccttattctgctgcaactacttttgcaaacccactttgagcaacccttgctgttttttcttcttcactgacttcatctcctttgaaaaatacagcccacctgggctcaggtcctagctccatgtcttatttgcaatatgaaggtgaaaaagttacttgaccattgtgtgcctcaatttccccctctgtagagtagatgcagtgagagtacctgtctcagatattagtttgaggactaagagattagattagtatgccaagcgcatacatactaatgactgcaaatagatgtgttcagttgctgatgtaggctcacagcacgccaatgaccgtgcttacacaactgcagcggattttaatgggacacaggacaacagtagtaaaataaatatgtccattacaattcatgactaccttgcagtggggatcttcagagaccaggtatgacctccagctgtctttctgctatgagaatgtgggtgcctctcctctcagattgaaaacaattaatatacaaaacaccttagaccagagaaccactatatagtctgctgtttcttgtatgctctggtcatcttggtctattgttgtgactgagaatctgcttctttttttttcctttcctttttttttttgtttttccttttgtttctgtttttcctccatattttaatttaaattagaaacaagattgttttacatgtcaattccagttccctctcattcccctcctcccctgccccccccccaccaactgacaccctacctgtcacataccctttctgctccacagggagggtgaggccttccatgggagtctgcagagtctgtcgtatcctttgggatagggcctagcccccggcccccatgtgtctgtgctcagggagtatccctctatgtggaatgggctcccaaagagcacacctatgctagggataaatactgaaggtcctgtagatttctgaggtctcctcctcactgaaacccacattcctggggtctggatcagtcccatgctggtatcccagctatcagtctgggtaccaagagctccccttgttcaggtcagctgtttctgggggttttacctggtctggaccccttagctcatcacttgtccttctctgtaactaaattccctttcagatcagtgattagttgtgggtgtctgcttctatttctaccagctgttggatgaaggctataggatggcatataagtaagctaccaatctcattatcagggaagggcatttaaggtagcctctcctctgttgcttagattgttagttggtgtcatctttgtagatctccagacatttccctagtgcctgatttctctttaaacccataatagctccctctattatggtatctcttatcttgctctcctctattcttcccccaactcaaccttcctgctccttcatgtcctcctcacctctcctctcctccccttctcctcctagctccctctcccctccacccatgctcccaatttgctcagatcttgtccctttcctcttttccggaggaccatgtttcctagcttctctggtggagtggattgtaggctgctaatcctttgctctgtgtctaaaatccatatttgagtgagtatatgtttgtctttttgtgactgggttaccttgcttagaatggtttcttctagttccatccatttgcctgcaaatttcaagattccattgtccccttcccccggctgagttaagtactccattgtgtaaatgtaccacattttctctatccattcttcagttgaggggcatctaggctgcttccaggttctggctattacaaataatgctgctatgaatatcattgaaaagatgtccttgtagtacgaatgtgcttcttttggttatatgtctaagagtggaattgctggatcttgtggtagactgattcccattttcctgaggaatcgccatacagatttccaaagtggctctacgcgttggcactcccaccagcagtggaggagtgttcccctttctccatatcctctccagcataaactgtcattggtgggtttgattttagccattctgacaggagtaagatggtatctcagagttgttttgatttgcatttcctgatggctaaggatgttgaacactttcttatgtgtctttcagccattttagattcctctattgagaattgtctatttagttctgtaccccactttttaattggattatttggtgttttggagactagcttcttgagttctttgtaaattttggagatcaaccctctgtcagatgtggggttggtaaatatgtttccccattctgtgggctgctgttttgtcttgctaactgtgtcctttgccttacagaagcttctcagtttcaggaggtcccatttattaattgtcgatctcagtgtctgtgctactcgtgtaatattcaggaagcggtctcctgtaccaatccattcaagggtatttcccactttctcttttaataggttcagtgtggctggatttatgttgaggtatttgatccatttggacttaagttttgtgcatggtgataaacatggatctatctgcagtcttctacatgccagcatccagttatgcgggcaccatttgtaaaaatatggaacgcttcatgaatttgcttatcatccttgcaaaggggacatgctaatcttctctgcattgttccagttttagtatatatgctgctgaagcgagcactgtttgtttgtttctcacataggatttttctctgtagtcctggctgtcctggaactcattctatagaccaggctggccacaaattcaggtatctgtctgcctctgccttctgagtactgagattaaaggtgtgtgccaccctcccaggctgtgactgagaatcttaacagcgaagttatggaggtgggatgagatggttgatactatgacttaatttttagtttgaaccacatgatattattatctttgtaagtaaaaatggtgggatatcagcaatatcatattgttcaagttaatatacttactattttcactgttgtggatgggatttggaaatttcattttcttttctgtcctgtcccactcagtttaatcgaacttcaattgtagctagaagtactttttccttgtggcatatttaaaagcacctggaatgctctataataataatcttgtgaaacagaatggatctattatgcaaatgatatacacaacaagtagagtttagagagtgaacaaaaatttcattgcaatgagtcacagatctgtatcaaggtctctggcataccatcatccctggaccctcaccaaaactcctcttggataccctgcggttgccccaagtcatggggatcctgtggtttgttttgcaggaccagtcccctcatgaactccagcagatcatagatggtagacattagggcaggccaacccaaggccccagatgtgggtctgggtggtagctgacctggtcagtccaggccactgggactgccccccctgaggcaaggaacagaaccaattctcctaagcatatgccattgggaccagctctcccatgcccatgatgagggatggggacatctttcttgagtgtgggggctagctcttccatggggggctgggccagctcttcccctgcagtgatcagtgaggggcagggttagctatcccagggccagttaggggcagggctggttcagcacagccctaggatttcaacatgcatgcttcctatgaccacctgtggcaacacaggccatggacatcatcacagaccccagctgcagtaggaccacagactcagacatggaccttggcagcagcccaggtccagatgacactatgacctcatgtggcaacataggcaacccagattggcatggccctggtggcagcatggccctggtggcggcatggccctggtggtggcatgaccctcagacaccaacatggccacatgttgtggcttagatcatgggcatccatgtgccctttgttaccattggccacagacatcaacacagccccagacatggtccccatcagcagcctgagcttggatgtcacattggccccaggtggcagtgtaggccactcagattggcacagcccctgaggcaacttagccctcagacaccaacatggccccaggtggtggcctagacctcgggcatcggcatgacctttaatggtaagaggaaccatggacatcaacacaatccttaactgcagtagggccacagatccagacatgcccttggcagcagctctgacacactggccccagatgacagtgcaggtcactcagattggcatagcccttaaggcagcatggctctggggcaccaacgtggccatgggttgcagtctagaccctggacatccatatagcctttggtgtcaccacaggccaagaacaacaacacagaccctggctgtggtgggatcacagacccagatgtgctcttcatctgcagattgaacttaaatgttaccagggtgccaggtggcagtggaggtcactcatatctgcatggcccccacggcagcatgtccttcgcccaccaacatgaccccagggggcagcccagaaccgtgacatcaacatggacttcaattatcctttcttcttgtctccaacagtttctccatcttgcccagaacattcttcctccccacgatctggatgcttccctttctacatcgtcatcttcacagttaccttcattctcttgttcatatttcttgtccataaacatatggaaacatcacgaatgtgtgcaatatttatttgctgcttttttctgagacagtgtctcatctggccttgaactcacaatatagccatggaagaccttgaacatctgattcttctgcctctacctcccataggcaggcaccaccatgcctagcttgcacatttttaaattttgttttgtcttagttcggcttccaattttgtatttttatataacaccttcaaaaacattaattttaaaagagtggcatagtgatgccacccctgtaagccaaacagtccagaaactgaggtaggaggaacactagtttgaaacagcctaggttacacaggaaactctacttcaaaaacaacaacaaaacacactaaaactaaataatcaagcaaaaggacaaaacaaggctatagaatgttggttactgttgtggtttctttccataatacatcaatataacttccaaatgccatcctcctcagcatccttctccaccttgtgttccttcaccaacaccacaaacctccacttctgagtcagtggtactgttctgtaggtaacagccattcagatggagcaggagcctggagatgctctttgtggttagtggcctcattgttaaaaggatccaggctttacagaaagctcagctctttcaaaggtcccatggtacttacatttttttcagatggttttcatatcagtccagatgccgacatttggaaatttttctgctaacgtggtcagatcttcaaagtgactcttgtctctgagctcaagggtttttttttttttgtttttttacttaggttgcttgaagctgaactcaaacccacacttataatacaaagaagcccacaaactcagtggttactctcttcatctctccatcacttgatttgtaaattgttcaagacaagtcctgaaccacatgagaggttctcacactacttgggttcacggagctagcagccaagggaagccatgacaatgtgcagactaatgaaagatatcataatttaattttaaaatcttattaggtataaaaatttcacttaagcataagtttataaagatttatttatatattctgtataacatagtgttcattttaatttttgacaggtgcaaatagagctacctggttaaaaaaaaaaaagtgaagcattctgtgatggtttaaataggtatggcccccatggatcatgtgtttgtatgcttggctcatagggagtggcactattaagaggtgccacctttttggaggaagcgtatcactgtgagggtgggctttgaggtctcatatatgctcaagctatacccagtgacacagttcacttcctcttgcctgaagatcaaattgtagaactctcagctccttctccagcaccatgtctgcatgctgccctgcttctcaccatgacaataatggactaaacctctgaaatgctaagctagcctcaattaaatgttttcctttataaaagttgctgtggtcatgatatctcttcacagcaatagaaaccctaacttatacacattcattaacaaaaataggtattgtataccatcaacacactggttggtatcacctgcctatcacttgtgctgccatttgtctgtagtcccagccctcatcgagctaaagcaggaggtcacaatttgaggccattctgggtgacatagcaagctcctgtctcaagttgcccccaccccaaaagaagagaagaagagctggaaagcactgttctaacaaacaagggctcctcggcagtgtagccacagactggcctttgtaggatgtaaacatcttggaatttgattcgtgagaggattcacaatgacctttaactccgtttgctttagaaatgtccacgacgtgataggtctaagcattagcaaatgattttcataaaataaattccatttctcccaggaatgagaggtcatattctttatttaatagtgtagagagctgtaagtgaaaagacaccacagaggaatcactggctcaaaattgttgtcccttcacaatttttaacttcaatatttttcttgcatatcgttctccattcccaggcctctagggaacccagagttgcattctcattctctctctctctctctctctctctctctctctctctctctctctctcattctgtttttatgtggctgcatgctagtcaaacactactactgagcaacatctcagatcataaagtcacttactgttttaaaaccatgtatctatttgtttattactgttgtggctgtgtgcatacaacttgttggggcacacatgttgagggttgaggttagagaactgctttgtttgttctctcttcccacctttatgcggcttctggggacacaagttaggctacaagtacctgtgcccagacaaccatcttgaaatgcacaatgaatatgccagattaatggcttctcataaaaccctgtgagttgagtttggcaggactgggttaatattctattttatcaggtggtttgagaacttttttttttttttgatagctgacctcttttattttattcctttttatttaaattagaaacaatcttattttatatatcaatcctagttccttctccctcccgttctcctataccccccacaaatccccatcccatcccttttctggtccatagaaaagggtgaggccttctatgggggaatcaccaaagtctgtcacgtcatttggggcaggacctaggccctcaactggccaactttttttaaaattcatttatttattttttcttacaaaagtttattgcaatgtacaataggctccaagataacacttcattctagctgcaggtggcaaagatgctatagtagggaatccagatgtttaacaggcttcaagataacacttcatcctagctgtaggcagcaaagatgttatggcagggtatccagatgtttaaatagggatggaggagggtcaccatcatggaagataagaggaacagcttactttttgccagatttcttaattccacctgtggccagggggtcccttccctgtggccttggcttttagctcctcgagtttcttctgctcctctttttgtttctgcttgaaagcctgatcctcctccctatcctccttatcctcctccttacccatctccttggtctgcttcttgggctgtttcaggggcttctttttgccacctttgaggcccgacacggcgcctacagacggcgccttcccagaccctgatcaactggccaacttttcacattgactctgacccccacctcctaggatgcatgctattttatgatcctctcctctgtagactaaacccagtgacttgttcatgatcactagattacagctgagctgagaagactcaccttgtgactaagttttaagaggattagttcagcctgacatggaggtgaagcaggagaatctcaaatttgaagccagccgactctacctcaaagcaaatgggaagaatgtggtttgtatgtttcaagcagatttgagcaattgctccttagcttgcatgcttgggggaggcaggccaccacatcgatgatgcccacaagacaaagaactcaatcctaccaacaactacatgagctttgaagccttctttagtaaggtccggagatgactgcagtccaaacaaactcagcagcttgtaggagaccatgaagaacagaaatcatccaggccaagcccaggttcctggccacagaaactatgagacgataaatgggtcttgacttagccattaagctttgtggaaatctgttatttagcaatggataactagtagccagtataaatggaggctgactgtaatcagtctgtggaaatagatctctgcatttcccctgcctgcaggtcttttagtgattcagtcagtatcatactcagaaagtgatattatatgatgtccaaagctttgttgttgtatcagtcagggttctctacagtaacagaatttatagaatgactctctctctctctatgtatgtacagaaaggggatttattaggatgactcacagctgcagtccagctaatccaacagtggctgactgtgaatggaaagttcaagaatccaatagttgctcagtccatgaagctagatgtctcagctagtctttagtatacactggaatcccaaagaaacgggctctaatgccagtgaaggaatggacttgcgggcaaggcggggacaagcagacaaagagcaaaagcttccttccttcatgtccttatagagtagtggttctcaacctgtggctccaatctctgtagggatcaaatgaccctttcacagctgtcactgaagatcattggaaaacgcaggtatttacatcatgattcataaccttagcaaaattacagttatgaagtagcaaaaaataattttatggttgtggggtcatcacaacaacatgaggaactgtattaaagggtcgcagcattaggaaggttccagaagaagttgtagccctgattaaaggtatgtctccctgcctcaaaatatggattaaaagtgaatctacctaattaaaattgagtaaaaaatctttcacaggtatgccctctgtttttggattttagttaattccagatgtagtcaagttaccaaccaaaaccagccatcacagctgtggaatgcagcatctctctgtgtttcatctcgattgaagctctcccttttgatgctttgaaataatgtggaaaataaagcccagttaccatgtggtgagaaagtccacacaacttggaagagcctcagcctatagcccccactgaacctactcacccagtccagaccccaggcagatctgcagcctgcagatgatcccaggcccagtcactcaagttctccaaacctgatcctgcagagtaggaaaagtcataccccttcactgtctgaattcctaatcatgcaattctgggcaccataaaaagattattgtttaacttcacagattttttggtgatttctacaattcatcaggaagctaaaactctgccctgtgtcacatggcttgagtctgacttcagcattctttccaccctgacatatgctgcctttctatctggggtgcttatttttctttccactgattatagaagactatagcagcagtgcttcgtgttgccagtgtaccaggaccacttgggaacattgaaaatatccatgcgtgtatgggtcctgtccctagagatgttatgttgtctggagttcaagctaagtactggaatttctacaaaatgtctgaggtgtttctaagacacagtcatgtttgagatgactgccccatgtgagcaatgcaaaatcactgcacttggaatggtcaaatctattctcagtggcctaccctaaaggcatgcatcatgggattccacaagagtgtacatgtattcgtataagtattctggactcagcttagttttatagcattgcagggcaccagaaatcataatcctgcaaaagcctcatcttgtgtcatgtgaggagatattggaaatgcagtcatctatttgccaggaaatgaatcttcactagacaacccccataaacaatatgaggtgtcttgatcttggacttccaggcctccaggatttttgacataactttctgttgtgatccagtctactatgtttcttcttctgtacatccatttactgtgtgtgtgtgtgtgtgtgtgtgtgtgtgtgtgtgtgtgtgtgtgtgtgagcatgcaaaggtcaaaagagagcttgcaggagttggttctctcctcccaccatgtggatactcaggcttgaaagtaagcatctttaccagttgagctgtcttgcgggccccagtctcctaaaatttttgttattgtagttcagtaataggactcataacatctaataagactcatcacatgggacaactgtaggaagtagaaccatgaggtcacagtgaagcctaagtgctgagccttgcttcatctcactttctggctaaatgggatgattgtgtatgacagcctcaaatatgtcaaatgacaaatattaacaggtcacacaccttcagggtcacttagaggtaaacatggattcttgaaggtatatagatcatctactaaatcttatggttataatccaatacatatataaacaagcaaggcctggtggtgagccctgtaatctcagcacctagcaggtggaatcatgtgagtgtgaggccaggtgaggtgcatagtgaataccctaaaaaaaagtagcagtgatatggtttcaaaaaaacaacaattgccttttgggagttattttaacacaaggttcaatttttaaaacgaacttatatgggtgtgtcaattcacacttgcaatttcagtgcaatttacctctacttaggaggtagaggcaggaggactgagcacattccagaccattctgggctaacaatgagatcctatctcaaaaataaacaaaaagcaatttgaaggagatggcacacacttagctttcttgagcatgcccacaaatgcacaggattattctacatggaaggtgtatatgccatagttgtaaaattgctcttgtgtttggtggtgaacaccaaaatattgaaatggtgtgatcaaacaatatataccgtagggcaatgacagaaacaggctcactgaacatgaaggtagcagctgagcaagaatgctctgaaggaagaaaatgagatgatcacacaaactccaccccaaactgattatggcacagactactcatttagaatatgtgtgtgtgcatgtgtgtttgttcatatattttatgtcccgtgaagaaatagaaaaggggatcaagctgtggggaattaccctgcgttagctaagatgtagatgaaccaaatcatggttttgattgtcaatgtcttgctgttcatggaaacatggctctgacatcaacaagaggctcttctgttaatagagtctgtctatatgctgatgagatggattaattctgtctctatcccctaggtctaacacagtgggtctgtgtgtttcattagctggcttcccattaagttagaatgtcattcacaagttgcttttgttagatgttagcttcagactgtgcctgggaatcattctacttgccaacctcaaatttgcatttcattaagtgtctacaaaatgcactgatttcacacctcagagggactatcaaagttcctattgaagacaccgagaagcagtggcgctcataatactgtgtgggaaaacttacataggaaacacatttttttgagttggcttaaggaagcccactgaaaactgcccgaaatctcccctacactcagtgcaaagccttgggaagtttgtatgctagtttgatattaagaagtaaaatgggtggatgagttgacatacacctgtattctcagcacttgggaggctaaaatggctatggtcagggtcagcttggattgcatagcaagaacctgtcttaaataaaatattttgcaaagtggagggtgtgcagctcaatggcttgcttagtgtgcagaaggtcctgggttcaatccacagtaccacaaaaattaaagggacatttaaattaaaaagatgaaagttcaaccttgttctggaactgagtaagttaaaactgcttaaatatttggctagtgctcattataggtaagttataaagttagcagagaaagtttttatttgtttgctttttcaagacagggtttctctgtgtatcctggctttcctggaactcactctgtaaaccaggctggcctccaactcagagatccacctgtctctgcttcctgaatgctagaactgaaggtgtgcaccaccagtgcctggctcagaaaaaggtcttaatgagttggcatggacttgaagaagatgggtttggacaagatactgaattctatgtgaacttaaatatgcagaaaaatagtggctgtagagattaagaaacatagagcctctcaggctgcctgctctagtagagacagaattattactaagtatgaatgtctgacattgttactttggagtagattaatacactttagcaataagcatcgactccagcgttgactgcagggttctactttttgaaggctgtccctttcatttctgcttctcagttcctctttgagcttgcacaagatgaatggttctgtgagtgagctggcaaatacagagggaatggcctgactattcccactaatgactctgctgtgcttctggtcggggaagtgatgcgggacgatctgctgacgcattcaagatttctggcttccctaaagccattcttttttctaggaagttccttcagcagatgtgtaagcagtcatgttaaggggggcatggttgtgctagtgaagtgctttctggttcttagtgctctgcaggtattttcccctgtagtgatttgcaaggtaagggtggagatgctatggaattattatgcttttggagatagcggaggagaagcttcataaaaaagtactggcagaggcaggcggatctctatgagttcaaggccagcctggtctacagagtgagttctaggacagcctcgaaagccacagagaaaccctgtctcgaaactacctccccaaaaaagtacttgtgtaaaattagcaatcctctgaatcaagtgacatttaagcacacatgtcaccaactatcaagtgcatcagagagagagagagaaacagagagagagagagagagagagagagagagagagagagagagagagagaaggagagagggagggagagagagagaggtgtcacttagggaactggttctggacttctctatgacatgacaaggccattgttggttagtaaacagaagtcatggaacatccagtatagtatgatcacgcaggaaaaaaacaatcagaaaaccttttcaactaggtggcactcaaaatcaaagactttccaaatgatcccagtgccataggcaaagccaaggtcaaagctttgaagcaagaaggcagtactgagagatacctaattatccacgtgccacttacttcccggtgacctaaggtacaatctggagaaagcccaggtatcctgagaagggcactccaggctgaacaagcaggaccactgtggattccagcactgagcttccttgaccactgaattgcatgaagaagacaggagaccactgggcctacggcagaagaagtgctgggccatggatatgccaaagtcaatgttctgctcagacctgacagagatgaagacagatgttccaaagctcctgacaatggtgatttggatgttttcaacaaaatttcagtcatgtagactgagtccagctgtatagttgtatatttttcaccataaaaaatatcagaaacaaaattatatatacatatgcctgtatgcacatatatgcatatattatctacttctctctctctttttttttcagccacacagaaaaacctctggaagaatccttctaatttctactagtagttcatttcagggaaatgacttggtaggatggatggtgacaatgacaggtgtgtgccactatgcatgcccagccactgggattctttaactatgatacagacttaagaaagttgaagactggtatactgtacaaatttctggattatttgcaattaactgcatctcaaatttaaagatgattcatataaaaagatattaagtgaatcagctagaatctaaaatgcaactgggaaaaaaacagtatatttcatgtttattaagatcaatgggaatgaaccacttggatcttgctgtggtgtgtgacggcaaaaatcacaaatttggctgcttgtaaaaatgtcctcaatgaccagtaagtactttgtttcttagaagcaacatggaaagaatcagaagatagtggtattaccaaaagaaggaagacctgacattgaactgaagtaatactgtaaatatatatacaagggcattaagaataaagcaataagagctgtaacttgagccactagctataggaatgcgccatgacacttgtgaatcactgctatttctcgactctctttttcccatgcgtcaccttcctgatgttgagacacatgtcatttgtcatactgagtcctctttattcagaaccttccagaactcgacatgacaactttacaattagtcttcaaagctggcttcactatgtgtgccttagccctgtgccagcaaaacttgctgtactttgtacatccgtatgtgttttttttttccttcctatttgcttataatctcttctaatttgatctcatttcctgcagtgtcaaatatagtgcatattccttaaatgagaaaatagtgtgttctctgatttaaaaactacctggtctcaaattaaaaagaaaaacaaacaaacagaaaaggaaagctaattttaaaggtccagaggcatgtgggagagggggtaggggaagttggtttgtggagacaatgttagtatggactgggctgctttataggacagtggagtggccatggttagcagtaaggaagtgtttttcatttgattttaactattaagatatatttgctaccctttctgccgacagacccaggaaactagagccctcatccagtggctgatggaagcagagacagacatccacagatatacactgagccgaaatcgggaatttagttgaagagagggaggaatgaagactgaaagggtctgtaccaggttggagaaacccacaggaacagttggcctgaacaagggagagcacatcgaccccagatgctgtcggggaggccagtacaagactgatccagacccctgaacatggatgtcaataaggaggcctctgcactccagggagcctctggtggtggattagtatttttccctggtgcaagaagggactttgagagcccatcccacgtgaagggatacactctggccctggacacatggggaagggcccaggaccagcacaggaagatttggtggactttgcagagcccccgttgagggccctaccctgcctggggagtggtgggtggatggggtgggggtaggctgggggtgggagaggagggatgggggtgagggagaagggacttacatgtgaaacaagcttgttccctaactagaactaataaataaattaaaaaaaaagagatatttgctgtgcagtgtcattgcactggggcattcccatgtgtgcttccatgagtctacccttttttctgcccttacctcctcccagccctgaccctatttctagtacataccaggccctcagccactttcaagttgtcttttgtttggtttgatatttttttgttttgttttttgaagtttttatccttgaaataatgttttgtaccaattacctgtttgtgtctgcctatttttcttaaggagatgacctccatttgcatttattgtcctgtaaatgacaggatttcattctccctgcagataacattccattgtgtttcgatgccatctttctatccattcagccgtcaatggacacccataccctgtgagtcatccttggacaaatgtgtgtgcagctctcgctattgtatcccaccttccacaccttcaggtgtgtgcccaggagtggcgtcattggagcacacagtggttctatgattagtttttgaggaacctccgcactgattttcactatggctgtactaatttgcattccaaacaacagtgaataagatcctctttcccagcatatcgaccccagacgctctttgggaggccagtacgggactgatccagccccctgatcatggatgccatcggggaggcccctgcactcctgggagcctcctgaggtggactggctttttgccctggtgtatgtgggggacttcgagagaccatcccacttgaagggatgcactctgactctgaacacatggggagggacccaggcccagcacaggaagatttggtggacttggtggagccccggtttggggccctaccctgcctggggagtggtgggtggatggggtgggggtaggttggaggtgggggagaaggaatgggggtaaggggagggagagggagagggagaggggaattacatgtgaaacaagcctgttccctaacttgaattaataataataaaaagagagaaaaaaatcttattaaaaaattacagagaaattttaaaaaactaagagagaaagagaataaatgaaatatgttatgctaagcaaaaaaaaaaaaaaaaagatcctctttccctatacacacatccacactggcattgatatttttttgtactttgataatagatcttctggttgggtcaaaattgaatctagtgtatctatggctagtattttccttgtgggtaaatatgctgaacatttttttctacatatttatttgttctgtttatttttattgaaaataaagttaatttcatacaatatattctgatcgcctccctcatctcctcccaaccactccatccttccagctactctcatttggggggacatgattaaagccatttagagagcctgaaggacctcgcactagtcagttgtatttccagcccttctttgtttctgactgaaaaatgcctacgttggactccatctgtttgtcaggacatgttttattcaaaggctctacattcccatggctgctttttacagtatttatttatttacttattatatgtacattgttcttcctgcatgtcagaagagggtaccaaatctcgttatagatggtttgtgagccaccatgtggttgctgggacttcatggaagagcaaccagtgctcttaacctctgagccatctctccagccttaccccaaccccctttgatatactaaattgtccatgaactaaaggcatcatcatgtctcatgctgactgtgaatgggcagttattacaggatgccagggtaagggctaaggaaaccggctggtgcatgctagtatctttctctatgttctgtttgagcagtcaggacaataggagtgattcacactgtgcatgtaaaaagattagatgggggatggagagatggctcagaggttaagagcactggctgttcttccagaggtcctgagttcaactcccagcaaccacatggtggctcacaaccatctgtaatgagatatggtgccctcttctgttaggcaggcaaatatggaggcagaatgttacatacataataaataaatctttttaaaaaagattagatgtattgttagaataaaagttgataaataaattcatctgaatagggaaatggagcaataagccccctggaggagaagcaagcaggacctcggctttctattgtggttgccaaggctgcccacagttggtttctcttttgtgacacttgaagctccacatttgctcacgccttaaattttatttgattaaaatttatttgatgatttaataaagaccctggagaatctgagggagaagatcaaattaaatgagaattcatgttgaaaacaaaaatatttttgaaaaccaccccagatggccattgtgccccatctcaaactgtgccagcaccatcatttagaaagatttttggacgggagctaaacacagaaataattttccaaaaatctggttcaagccagttggaacattattgatacagttgctagtttttctgacctgagaatcttcagaaactaatacaacttaggtgctctgaggggagtatcttaaataacacagctggagttggttttcattatgtgcacaccgcacaccacagtaagagatacattatcaaaatgttagaatgagggccaaaagtggacttcagttggtagagtgttcgcctcacatgcatgaagcatgatctccagcaaggcataatccaatcatcatgacattggtttgtaatctcagccctttggaggagaaggcaagaagatcagaaaggtatcctcagctacatagtgagttcaaggctagcctgagatataacagaatctgcctgaacaacaacaaatccttcagaaagcttgtatgtttagataaaatgcaagaattgggatgtcttagtctttttggacatcttaaaaataattagcagctgagtgtaatggtgctggcccataataccagttacttgggaggctgaggtaaggtgattggaaaggtctaggccagcctgtcgcaaataaatgtgagctggaagtatagctcagtggtaccatacttacctagtatatacaaagccctaagttcatttcctggtattgtgacaacagcaacagtaaaatttagtgaattgtcttgtaatattctgggttcatttttaagtgccaggttgagtttagagccttatgcatgtgacgaaaggagtccaatattaagccacaccctcaggcctgaacagtttttttttctccatctgatggcagctaattatataaataagaattacacattagtaacttttaattttcttgtgcagagaagagcccttgttcaagggtagctttgacaggctgtcatgaaattcatctatttctattgtaaagattacgggatttatctagaggctggacaaagatgatacaatctaagaccctttaatgctaaccacagcatcatctgcctctcttaattaagttagggactgagcagtgatgcacactcttccctgttttaaatctagacctgggaagttctcttcctgaaaggtattcccagccctctctgctatgcagctataactctgatttaaccactatagtgtgcttgaattataaaccaaatgttttgtgaagaaatactaaccaatgctaaatccgcttaaaaagcatttttgaactatttaaataattttaggtatcattacaggccaaggaaataaatgacagataacccgggattaattgaccaggtccaacttctgccatgtaagagattttgagattaactcaagatgtcactgaaatctatttgtcctcatcttggtatactcctttaagaaaaaggatagtgattctgcacagcattcttcaagtgcccactgatgtttgcagcccccatttcactcccctgatggggtgaagtccgccaaattgaggtatcaatccaggtgccttcaggtacaagtctggcattcaggagaggggaaccaactagatttgaagatgcttctgagttgacaagggaaggggaggaccagctgtgtctgtctcaacaagccatcagagaatacagacagggaagcaaggatgcaaactcaaggaatcagagcaagaaagcaggaggggaaagggtccaaagaatatgaggagaaagaatagaaagagaggaggggggagaatgggggaggaaaaaaaattaagaagtcaaagctgagctgaaccacggcggaggggatggggagagcttgacagaacacggaagtgcagttgcttgttgtgacagatctaagtgcatcatcccaggtctctataacttcagtctctttttgtcatatgaaaatcagagtcctaaaagctccagggagcttttagctaaactccaataaattttcttcgttttagtaactccaactgggatgttttgcccaaatcaattcactgttttgaaatctccacagttagagaattacaatttagtctttcatatataccatttcccaaatgtttatggcattaaccaatcacataaaatattacagcaacaagtgcacatgcccttaacacttagacaccacaacaccaccagtccctgccacagttctaatttccctaggccaaagtgtgtcaaaacatgttctgtggaaagtaggggctacttaagagtctctacttgtaaaaaagtatttttaaaattttgaggatcctcaggagattttatttgaaaaatgaggctctgctccctctgtaatgtttgaaaattactgctttataaaagtagctcccacactggagcagtgttcccagatcccaggaaatgtgtacaatagaatcatgctgctgtcacagctcttgaccttggtagagctggagtggctggaggctgggaagaatagatggagaataagaaagcaaagttctgtggctcatcttctgcaaacacagcccatccatgccattgcccaatgaccctcatactcagaaggtacgtagaaattcaaccattagaatttaatctcagaaagagagaaactaaacccacagaaagcttgtaaaagctggttgtggtggcacatacccatgaccatagcatgcaggaggccaatgcagaagcgtgacaagcttgaggctagcctgggctacatagggaaagtttgtttcttccatctcaaaaaatgcaaaacaggctggcgaggtggctcagtgggtatggtcactggctgctattccagagaacctggatttaattcccagaaccacccatggtgactcgcaactatctataactccagtctcaggggatctgacaaattctggtctctgggggtaccaggaatgcatgtggtgcacagatatacatacagcaaaatgcccatatgcatgaaaatttaaaacaggaacattcttagttgattcatattaaccccaagctggaaacatgtccactatgaagccactggagctactgactgttagatttccacttaaattaaaggcttgaacatgaaccgtggagagtacattaaacaaagttcattacaggtgggggaggggcagaaatagaacagagcagagcagagagtaagagagaagagagagaggaaggcagaagagggcgtaggtgggagaagaggagaagagggtgtaagtggacaggggtctgtcttttaaaggggtcctttacacctgtgtgcagacttagttcccatggaaccctgggctgaccagggtacagccagagtagattctgccaggtaatgggcaggccagcataatgcctgaacctttcactaacaaccaagtgaataaatgagccatacacacaataatgtaagtaaatctcaatactatcaggtcgaatcaaacaagtcaaattggacacaaaagcacacatatagtatggttctgttcatatgaaatctagaatgggcaatctaaatacacaacaatagaaaaataacaaatcagagccgtggtggtggctactgggaatcgggttgtctgttaggaggcacaagaagcagtctacaacgtgggagaggatgacgaagtgttatgaattttgattacagcagggattgcatgagcacatttgtcagtactgaggaaactgtatacttacgatttatgaatttcagtgtatgaaatatatatcacagacctactttggagaaaatgctcaactgaaaaattacatgtagaaaatatatatgaaaatgtggggaaatgtctttaagtaaacttgtcattgaagggaccagctccccgtttcggcagccgtaacagtctaacacgtgcttgtctgaccttgccttggtcactaggaggtcagatgcctgcctcatggcaaggaaccaatcagaagttagctggtggtgctacgctttatggctctgggtgtgctttatggacaagtgcacagcaatgatgtgcagagcatagcagccaccctgggagggcctatgggccataacaaccacttgaccaatcagcaccgggcaagttctccaagcctggaagcacaccaatcctgagcctgtgcatacccctagacactccccttatgctgtcctataagatctttgtcccagggtttctcggggtctttccccagccatccgccatggtgaatggatgaaaggcccgagataatggggttagctcattaaacaactgcaataaagcctctttcagtttacatcaagtccttgcctctgcctggtgattggggtcgccacattcctgagtggtcacctcagcgtcccaccccgtggggggtctttcattataaggaagatgaaggatagtcagttctatacagaaaacattgacaaatttcttcatcaaaattgccaacttaatagagaggaggtttacagaaaaggccaattgagaaataacctgttagacccctggaaaactcaggcctccggggtcccagcccaggaccgtggtcaccccaattaccaggtggattcgaaaacttgctgcaaactgcaacaaactgctgttgtttaacgagctaaccccatgttagctcgggtttttcacccacccgccatggcagaccgccagcaaagacagctcgaaggggctgcagagagatcttgtaggacagcataaggggagtgtctaggggtagcacaggctcaggattggtgtgccttcaggcttggagcacttgccctgtgttgattggccaactggttgttatggcccatagtccctcccagggtggttgctatgctctgcacatcattgctgtgcacttgtccataaagtacacccagagccataaagcatagcaccaccagctaacttctgattggttccttgccacgaggcaggcatctgacttctagtgactaggacaaggtcatggcaagcatgtgttactgtcatggctgccgaaatggggggctggtcccttcaaaccaatgtctgccctcataagcaattaggtggtgcaagtttttaagagataaaattacttcattcctattacattgacagtaatttccaagtcttgtgtttgggtgaagatgtagggtataagtcactctgtactactgaattcccaattgagtcagtaaatttggtgaggtgacccatcctagtacctaggaactgaacatctgttatgcagtctagacacatctcacatgacacagggaccatgtatgatggcaattattgtgatgatgattgtactcataaaaatggattctgttatcatgtccattaataaagggatctgtgagtgggcatattttggaaatctattccaccctccctgccatgagttcagaagagcccagaatttctattgtcttttagatgttagctaatagctgcaggatgtcctggcctcagtggggaatgactcttatctaaataacaatacacttgtgccaagggtgagtctacacccaccctgaaggccagtgagatgtgctagtgtgaagtgtctgaaggctgcaaaggactgtctttaggattaagggaaatagttgcgatctgccctttatacatgaaaatagatatcttctgccattgcccccacctttggatggttacttagtaagctgggcaccttcagtattaactgattgccctcctgttatgatcagatttttttttttttaacgttgttggatagctagctttccctcatccccactccccactcagggtcagacccagggttgttcggctggttccaatcgcagccccaaagacatcagtctgagacaaatggcttctgaacatggggctaatacagatggtcggtggcaagggatagatgaataaaagttgtgaattcatataatacaaaaagagtatggcttttaaaagatgaacactagatctacatataccaagatagttagctatcagaactcagaacatgtgaaaacaaacagtgtgtgtgtgtgtgtgtgtgtgtgtgtgtgtgtgtgtatgtgagagagagaggggggggagagtttattgtcacatttactttcaaatactagaaactagatcacaagagaatatgcgtaaaaatcttggtattggctccatctggggagcaaagaatgaaaaaactaataatgtatcaaagcctaaacagaggccagggtggtagcacattcctacagtcaggaagcaaaggcagtaagtaaatcatcccctcgagttcaagaccagcctccaaacagcaaagaccaggtcagtctgggctacacgataagacctttactccaaacaaacagaacccacaaaggaccaaccagaagactcagttatcaaactatacgcaaaaatcaacccaaatgaatcataaataaacattaaaatgttgattctagcttgtggtcacaaattacgaaaatagttcttagacacaaaacaagagaagtcccttaaggtttaaaaaaatattgatatattagatgacatcaaaatgaagaacattctccctgaaatacaccactacatgaaaaatgaagctgcaaactgggataatgaatttataaattattgaacttacaaccagatatatgaacaactatcacaactgagtcagaaaattaccaacctaacttatttatttttggctgtttggatgtcaataaacacacgaaaggcgtttgaggtccttactggtctgggaagcataaattacaactgaaagagatcacaatgaagaagtttatgatatccagtgctatgaaagaggagggacaactagaacattcagacagtgccagggggcgagggtggggcgctcacaaagacacagccactttggagagccctgcagccgaaacatgctggcctgcaggtgagcctagccggctaatgtggaagtggtgagggtgagggcacaccacctgttcctcttcccacggagccatttcagttttgaattcactaaaggtcccgctggcttctcataaataggccagtctaatagcaaatgtcaatgttttgcatttccaatctgctttcccccttaatcttgactaagaaacatgaaaggcggtgggacaggggaatgggcgtatgagggggtctggctacctggctactgatgtcagatatcccaagtgtgtactgtagcacatgcctgggttttgcagaatgcccagggtccagtggcagattccacaccctgctcaaggagtgatgcctaccaggaatgcaagtgctgttgcccatcgaggttcctgggtgagcctaaggaagcaggagaaagaacagaaaggcggtgggggatgagaaagctaacgcctgtctatctgcccctagttcatcaagcttctgaggccttctctcagggaggcagactgttctcgctacaagggacagctcttcaggctggttaaccccatccccaagattctccctgcatctcctctaacaacacactggttccattggatctgcgtcttttagcccatgttatttgtctctgggagacaaccttccctgatctgtattaagaactaggtcagaaacagtaaactagagaagcgtaggcagtaacaccaagaacagaaggtattagtattcagacatctgtactatcctgaccttggggttctgacaggatatgccctcagctgcagccactaagagcaccacctgtgcatattcactatgttcccttttaaaaggtacctgcccacttcccatccttcctccccctccctccctccctccctccctccccctccttccctccctctccctccctctccctcctctctctgtctctgtctctctctgtgtgtgtctctgtctctgtctctctctctcctctcttctgctgctcctgtccccagaggctggactccccctcccctttctcctttttatgatcccttttcctaattaaacaaacaaacaaaccctctgcttgaaccctgttgcatgacatctttctctctaccactgcttttcttaaattacaacagaaggggtctgatataagaaaagaaaaaaaattgaaacattagaccctcttgttctgattttactttccaaatcagtatttcattttctttgccaataaggaaacacaaatataagtatgatgagatatgtcaggtagtgcttggttttgatttagtaacaataaaaaagaagggagtagtggcaaattacaagtcatggccatctaaagaagtggttttgcaatgtgggacgagggaccatgtttcatcccttattgttccacaaaagaaggaatctgggtctgaatatgaaatctgaattttaaattttgaacaaaactcaaatgttattaaaacattgggcaggccaactctcttcaggccaaacacagcagatttggaggccagatggagaacggcagccaccactctgcaccctctcatgtagatagatgaaaactagcccaagccaaccatcccactgtgtgacctactgagacctcccagttcctagtaagcccaagggagacttacctctctgaccacatgggagagaggaaaggagaagtacaaattattctgaagtccctgaagaaaacaggaatagagtgttccgtataggctagctgttcctttgaaaaagttatcttaaaagttatttctctcatattccagagatctggcagcatatgcattagactccctccaggaggaaaataagcgagtcacctggtctccctctgattatttatttagtggtgttgggatctaagagttagacagactccataataggcagagggtccataagtattaaagatggtgaactttcctgatggcgggctccttccacaccctcatgacctgagacaaaagcctggcagcttaaaacaaagacctttgggtttgtttttttttttttctcctgccaatagaaccccccactgatggacctgctcaccaagttcaaggacagatcaggacatgtttacccaacaattgtgtgtcaaccaaccatcttgtctttcttcaaactcaccaaccctacattacgggagggtaacccttcagagacttacaaaccagtcacttagtcatagttcctattgctgcaataaaacaccataaccaaaaccaaggtggaaaggaaaggttttggcttacacttccacattgtagtccatcactgaaggaagccaggacggacagcaactcaaacaggacaggaacaaagcagaggccatggagagatgctgctttctggcttgctcctcatggcttattcagtgtgctttcttatagaacccaggaccaccagcccaaggatggcaccacccaccttgggctgggcccttctccgtcaatcactaattaagaaaataccctgcagcaggattttatgaaggcagtttctcaatagcttcctccttttatatgactccagctggtgtcaagttgacctaaaattagccagcacagcattctagttttctccactattatctctcatgttagaggtttttcctgcctttcagttctttaactggtggagaaaatgaacccaatcaaaaccacctagacagtagcaactgggccttctgtgaatctatgttaattcttttttaatttatatttttctttatctgtgggtgcaagtatgcttgtatgtgagaacacctttcagatgttgattctcgccttccttctgaataaaaaaatgaaataaaaggaggaagacatacctactcctaaagcatgaagaagattttgttgtagatacagggataaggcaggcagagggaagaattcaggctgaacatgactggcagactaaacctgaccatgaatgaagagagcctgagagcaagagaaccaccgaccgtgggaggtggcctgggccaagaggccaagagaccagagtagacaaatggttgaagttatacaggcatcaggctgggggaagtgaagtggaaatcctcccctcacccccaccccccgaggagggggaggagtgagaagtgcctgagctacaggtactcagtgagacttgtcctgggtttcgttgagaccaaacaccaccgtgaagcaaggtctttctagtttctgccccactgcttactccaggagctggcactaagctcccagccattttcctcactccttccatctcaacacaggagtactgcgattacaggtcgtcacgggtgccaagctagggcttttacccgctgagccatctcactgacccgggtcagcatttttaacaagatcaaaaaattcttgtccacgcggacatttgacacccatcgcgctggattgtgtagactttcagatgaaggactgtttccacagcgaatccattttgccttatagctaaaataggaaaggaagaaaggcctcgagcgccccctggaggtcatcttaggaactgagcagttttttttctccccagagatattgagaataaaaacactaagtgtgattttgagtccttactaacgtcaaacattgtgattagaaagtcacacaaattatctcattcagactattatgcaggcgttactatcctgcaatccatagaagaagacgtttccttgaaagtctctggcatttgatctcttctgtgtcaacatgctttcccttggcaaccaggacacccacactctcttttgtttgcctcgagtccctccggctcccttccttttctgactttgtttcacacccatctttcagctctgctcattttcccacagggatcttaatgaagtcttttatccatatgtcaacagaccctacatttctatcttgtgatcagcgtgcctctttacacaccacacacacacctgccttctgcatgtctactgggatgcctcagagacacctcaaactgtctaaaaacaaagtttgcattttcttccttaaacctcttcgatacgagatttctctcatctcaggtgatgttaattctgtcagtacagttactccgacccaaatgcttggtgccatcattagcccagctcactcatatacctcctctaccccacagccccctcttaggtaagacatcacccccctccaggcctgcactcttgctacagcctcctgcttggtcttcttatcaaactttcctccgaagagatgattctcagaaaccagaatgactttcctagaatgcttctcagatcttaccataatatctctacctaatgcaatacctaccaagcctctcatttcactctgttgaatgccaattccttcatatggctaggaagaccttgcacagggaaggtcgctcttgtttctctgactctgcctcctgctgaattctccttcattcaccccactccggacccgtgtgctactcctggtggaagcacccacaacaatgcactcatttaacactttgcctcctgtaaacactcattccagaatctcctggtctacagagtcgactctgtcatttctatttaaatttgcaactccccccaccccaagcctcttatcacagtggaccctgtccatagcatttttatggcttcccgacatcttatctaacgtaacagctatatttgtgtgtattagttttccatccactagaattcttaacccaaagaagcagatatttctgtcatgtttgttgactagcatgcctcatccatagatctgtgcctgaatttttttttaatgtttgttgaataagacatggactggctacatacatggccagtcccggtacttcatttaaaaagtcaatcagaataagcatgtcttcttttatagagaagtctttcagttcaatgaagcctggctcggcagcttctgtgcacagcagcatggctcctctagttcccaagataaatgacatcaatcagggctatcccccatagacctttcctggagcaaagcttagcccctacccctcgtgtgttacatagtgattgggtgtttgtttgtttcctgacttacctaaagaaatgatgctgagttactcatagaattgtccctccaagcaatagccacaggtggcattttcatatatgattcccatttaaatgtgaatcccaattataattcacaaaaagaagctatgttaagttgtgtggtgtggattttctacaagttttcctgagtaatattgactcatctttagatatgtcttgataaaacaaatggctatgctgcaagagtcctgagttgccagcagttgtatttgtcgcagtgaagcaagcctgccaactcactgctctggggactgagtttggagaacaaggctgacatgcctgctgttgtccagcatttggatgcacagggcgggtcctggaccttgtgtttcttacatcttcttggttgcattaacctaacttgctattgtagacgctgtctcacaaccccagagccacagggtcccaccttctgcttctttgcttaccatcactaaccccaaatgctgttctagcccaaatgccagtctgacccaggtcctctagtgctatgactatggctgctctacaaatgaaaacaaacccaagggattgctcagaacttaatgaatgagccatctgaagcatgtcttttccataacttgtttttacataaaaaaatgaaagactaccgtgaatcactgccagaaaatgaaaggacagaacaggaaaagccctgccctctgaaaaatttatcgagtgcacccacacaagttcccagcagtcgaccacacacacacacacacacacacacacacacacacacacacacacacacacagctcctcagatttatagtttcatcttgcaaaatgggaccaattgctctgagaaaaacaatccactagacagattgctcaagtgtaaaagaaggatttctgtctatcagtagtcaactcatgttgagagtgagtttaaattgcaaaagtaaaaacagctcaacagtataagacatctctactgtagttgccatcgtatctatatggaactcactatctataagagtcacttcagaatttgctaaataccgcactgctagctagtgcctcctccacagtgaacacttgtaattgtaacacaagttcaggtggcacatgaacctgaactgaagaaacacttgcttcccttgacatccaggactccacactctccaagctgtcatctcacctccctggccaccacttctcagtctcattccaggctcctgacctccagcttggagactgctacctggagcatctctgccagtcttcagtgtactaggtgtgcactaataatccctgcttttctatctttagatctgaactctccctcgagagtgaggctactcaaaaacagaaacttactgttctacaccaaacctctgaaatctccctttaccccaccagaaagtctttctcacgcattatcaattccttcgatcttattcctttgtctaaaattctgcacccacttctgtctctcataatgtctcatgtggtatatattctgcaaatctcctgtggtaagtgttcaaatcctgtccagaatccaatcacttctcacatgtctcgctatcgtctgtgatggtcctctaatgggattctcttcctgtcacatcaccctgctgcacaacagtcctgactccagtggttctgacaagtggtcccagatcagcagtatccacagcacatgacaactcacaagaggggaaagtcttctgaacttgacttccttaatcaggactctgaagacaaggttgggtgattcatggtgtaaaagccctccaaggtgatgctggtacaaggtcaagtatgagaaccattgatctccagagcccccaaagggattctttgaaaagttaagccaatgtggtggtttgaataagagtctgccccaaaggctcatatgtttgaatgcttggtccccagttggtagaactatttcaaaagtatgaagaggtatggccttgttggaagaaatgtagatctgggagctacctttgaggtttcaagagaccaaccattctcagttagctctctctgcctcctgcttgtagatcaacatataggctgtcagctactattccagcaccatacgtaccttcctgttgccatgcttcccactatgatggttgtggactctaaccccctggaaccatgagtcccaaattaaatgctttttttgttttgttttgttttgttttgagatagggttgtagggggaaatgctgaccatgccctcttgggggctggcacaggtgccgctgaccacacccacttgggcatggtcagagtgatgtagcaaggctttaaatatcagaaatacactcttccttccctttccgccgactcatcacagaccagagtcctcatccagtggctgatggaagcagagacagacatccacagaaatacactgagctgaaatctggaacctagttgaagagagggaggaatgaagaacgaaggggtctgtaccaggttggagaaacccacagaaacagttggcctgaaaaagggaaagcatatcgaccccagacgctctttgggaggccagtacgggactgatccagccccctgatcatggatgccaatggggaggcgcctgcactcctgggagcctccggaggtggactggcattttgccctggtgtgtgtatgggactttgagagcccatcccacttgaatggatgcgctctgtctctggacacatggggaagggcctaggcccagcacaggaagatttggtggacttggtggagcccctgttgggggctctaccctgcctggggagtggtgggtggatggggtggggggtaggttggaggtgggggagaaggaatgggggtgaggggagggagagggagaggggacttacatgtgaaacaagcctgttccctaacttgaattaataataatattaataatattaataataataataataaaaagagaaaaaaataaaaaaaatatcagagatacaggcatgaggtgctctttttccctcttccaactggctaaacaaatgagcaggcatctggtgtaaacctggtctctggctccgtttcgtcagtactttcttaataaactacttgcagtcaatctagttctgattcaattgcaatcctctttacagggttgtattgctttggaggctgtcctggcactcactctggagaccaggctggcctcgaactcacagaaatccacctgcctctgcctcccaagtgctgggattaaaggcgtgcaccaccaacgcccagttttattttatgagttgccttggtcatggttttttaatcacaggaatagaaaagtatctaagacagccagtttaaaaacaaaaggcatacaagagagatccaggaaatcagaggacatgctgctatggtctgttagaatctccagggaatacactggggaaagctaggtaatagctagcagaaagggaaagccaaaactttctagtctaataatgaagtaaagtaggaaatttaaggatcaaaacaaggaaaaaaacatctgtcctggagagattggctcattctgggggcactggtatctcccttgaaacacagtcactggggccacacttaagacaaagaaccacagaaaataaacattgcactcttactgatgtgtatctaaagagggaaaataataaaaattattttcttttgcctttatcactcttattctctcagaacaagcgttttcagtgtccaagagggagtatgcagcagtaagtttgagggactatactcaaaggaagaaaaacaaaaattgtacacggcagcagcagagtaggaagaagccaaaaaaacccatctcctctctgtgctcagcccgagcagtggcaatataccatctaagaagactcctgctgagtcacagattgacagccccaagcattctcaggactccaaaacaagtgttccaggattgtccaccaaaatgtggccagcggaatatctttagactacagggaaggatgtctgcactagagcactgccttgtttatctacaggagaacttagatttgaagcagcaagccctatgttgggaagaaatgttcaggagaggagacagcgtttgtggtggaacttctgaaggaccagcatctccgacctgacctataaaggacagccactatcagaggtagctctgtgaccatacctaaatgtcagcaagggctgctcagagtcaagaacagtcttttcaacttgaactccaaaggacttcccagaggactgtctggagctgtgaccaacatctgtgacttaatctgtgatgggccacccaagggtgtgacaggcatcagggagccactgaaggaacacaaagagaataggggaggctgcaaccatcaatcaggcagggtaacactcattctctggtccctcgtccagtgctctccctccttcacagtcttttatttataccctgtgccaccattgctggcagctctgtcttattctgttctcattttcttgattttccttttatcccccgctccattttttccctttcccccttcagtgggctttccaaactaacataggctaatgtgctttgcaggactctttggattggcttcctaagacctggaactctgtcttattgcatgtctttacctcttcctttttttctacctttagccaaaaccacctcacccctttctcataccagttgcttccatttgatccacttttccttcctctactcttctctatgagcccaaaccaacccccatatttcctcttcttcttttttttttccatgccgctcatactcacagtaactaatatcttagaggacaccatcttctctctgttctcttactttctaacatgattagagtttgaaggtctgtgggttgttgcagcatcattaggtttgttcatagtgggcctacactttgaaagtgattgacttggtagacattacttatcttcagtggagtactacaactaaacccagggtcccaatcaccagtctagcagaaaagaacaatgctgcaaactcactgctacctagtctctcttgaacactgaaaacatgttggctgagagaacaagagtgaaaaaaacaaaagaaaaatgccctaatcctgatgtagaagtcccaatacaaaaacacaagaaacattaaaaagcaaagcaaagcaacagaactcctgtaaaaattgctatttttataggtcctccaatgagagtaaaaactcaatgaaacctttgacaaaaaaatgattataagtatgtacaatcaaagaagactcaaacttaagagactataaagaactaagtgaaataaaaaagtacaaaatatgaaagtagaattcaataaagagaaaattttaagaacttgaaatacaagaaagaaaaggctcaataaactaaagaataggctatgtggaaagcctcatcaacagatcatggggtatgacagatcatcaaagttagaagacaagttagaggaattagaatatgcagatgatgaaaaagcataaaagaacattcaagatctatgggacacaatgaaaagactaaatatatgaatcctggggtctagaagtaagagaagaatagtgttaaagttagacaaaaactccccagatctaaggaaagaaatgcccatctagatgccagaggcatttgtaacaccaaacaagatcagaaaataacatccccatgtcacgtaatagttaaaacaccttacagagcaaagaaagagaacacaaagtcacttacaaaagcccatccaacagcaatagatttttttcaacataaactttgaaagtcaagggcttttacagaagtgtattctgggctggtgaggtgtcggcaaataagaatgcttgttgccaagcctcatgccctgagttagatatctggacccccaccatggtagaaggaaagaaccaagctctgtaagctgtcctctgacagccacactcacactgtcacacatgcatatgtacttatatacacacatacatgccacagacaaatgaataaatgtatttcaagttctgaaagacaacagcaaatccaaactattttttaaagattttatttatttatttatttattatgtatacaacattctgcttccatgtatatctgcaaaccagaagagggcaccagatgtcataatggatggtgtgagccaccatgtggttgcttggaattgaactcacgacctctggaagagcagtcggtgctcttaacctctgagccatctctccagcccccaatccaaactactaaacacaaaactacctaccttactctaaggagaaagaaaatgcttgcccaataaaaacaggctaaaggaatttataaccacaaagttaattctatggaagattcttgaagaaactttggaccaaagacaaagataaactcatccatgaggcaatgagaaagaatgactagctatgctagtatttaagcaaaagaataataagaacacaccaattagtagaaaaatcaaatgaatgatgaaaattaatacacattttcaaataataaccctgaatattaatgaacaaaattcctcaaccaaagacacagattctcaacttggagtctaaatagaatccatgtattttttgccctaaaagatgtatgttactataatagacagacacaacctcaggcaaaagaatggaaaaaaagtaaacaaatggaacaaggaaatgagcaagtcctaatatttggcaaaaaaaaggggggctttaaagcagaattagttgggagagataaagaaggccatttcgtttcatactaactaaggggaacaaacaaaaaggcattacaattttaaaactgaatatgtgcaaatggtatctctagtttcgtgaaacaaatgctactggacgtggaaacacaaattaatcatgatacaataataaaggaagacttcagctccctacagacacaaatagagatgccatctggacaaaaaataaacagaacatcagagttaagtgacatcatagaccatacacataacagacatctacaacacattccatctgaaccgaatgcaaaacacattctgctcagcaactatgatactttctcaaaaatacatcatgtgctagggcataaagaaaaccttaacaaatgcaggacaactgaaaccattccttgtatcctatctgaccccagtggcctaaacccaaaaatcaataggaagagaaagtacagaatatttaaaaactcatggacattgaacaacacactgttgaatgatgatgaatgggtcattgaagaaatcaagaaagaaagttttaaaaaatgaaaacaactccttaaatgaaatgaaaatgaaaacacaacacatcaaaaactataagatacaatgaaagtaatcccaaaaagggaagttcagagctctaagtgtctgcattaaaaagtggaggaatctccaataacgtaatgatgtaacttaggacctcaaaaacaacaagtcaaatccaaaattaatcgatgaaaaataattaagataatgacagaattaatgaaatggaaacttaaaagtccacacaaagatttcaggaaacagagttgtttccttgaaaagataaatgagacaaacaaatcaacccttggtggggagggcaggagtctcaagtcattgaaattacagattacaatggaaacattacaacagataccagtgaaattcaggaaatcacaatcattagctggttttgtcctgggtggtctgtatcctgggcttttgactatacttagctaaaggtgtggctcaagccccctgccacaggaaggaagcatcctaaattccctgattagtgtttctaagcctgtctttagaaagatgctatttcctgttttacttcagaatgtgttcacagcataccttggggctagatgatataaaatacccataaaggccctttgattacctgaacctggcttagaaattcattgatttgaagcaaagaagtataacaaaaataaaatgatgaaaataaaaaaggacatactttaaagacacttctatttcactaaattggaaatctaaaaggaatggatggtttctagatgccgatgacctatcaaatttaaacaacagtgggataaataatataagcagatgtatagcaagccacaaaattgaagcaataataaaataaagccctcctaacttgggaagactaggtgtggagtgctgacttccaggcagacaaggcagttgtaatcacacaacaattgaagcaataataaaataaagccatcctaacttggatgagtaggtgtggagtgctgacttccaggcagacgaggttgttggaatcacaacaaccatgattacatgcacaagctctagacaaaatttggactgtcaataccttgccatagaaggaggaggagttcatggaaccctacctctactgaggacttatatgcagttagtgataggtgggaagactgagattttcctcagtggtgtagctacttgtaatatgcccatgctcctgtgaacaaggcagggggtgtgaaggtggaggaggaagattaatagaagtgggagggagtaagacagggtaataaatcaaattacattctgtacatgtatgaaaacatcacaatgtagatcattactatgcataattaacatatatgctaataaaacatttttatagtctcaattttaaaaaaagtccaggcccagatagattacagaccaatctccctgatggacagaaatgtaaatattctcaagaaatttttcaacaaattcaagaatacatcaaaaaggttattcacaatataaataaaataagccttaagggctaagagatagctcagtggttaagagcaaattctactctgagaggacccaacttcaattcccagcacttataaccaccacctccaagggaagctaccacctccaggcacctatactcacatgcacagtcccttcccaccccatatacaaaattataaataagtcaactaatcagtaaataaagagaccactcatcatgatcaagttggcataattccagagatacagggatgatggttcaacacacacaaatcattaaatgttactcatcacataaatggacctgaggacagaaaacacagtattacctccactgatacaaggaaggcttttgagaaaatccaacatcccttcacaatgaatgttcacatttccattttctaaatgaagttgcaaagtaattttatgacttactttgttcagtctagggatttgagaagagtattgatatcgctaaactcaagtgatataaactttcttccctaagaaaatgtagttcctttattattgtttctattactcttgcttgatatatctcttgaaaacaggtctggtgtggtggcccgtgccttaaatcctagcactggggaggcagagccaggcacatctctgagtttgaggctacctggtctacagagcgagtttcagggcagtcagggccatgaaaagaaatcttgtctagaaaaaaagtgtgtgaggcaggtggatactgtgtctgtgtgcaattttcctttctttttgtgtgtgtttttgtttgtttgtttgtttaaaacaggatctcaggtagtcctggctggccttgaactcactaagtagcccaggatgaccttgaatttctgatcctcctgcttctacctctccagtacagagttacagatctgagtccccatacctagcatatggggtacaggggttgaattcaggcctttgactgatagtggccgaccatgtggtagatgtgactggactctggatacagcttgtgtataggttcagtgggtaaatgtcagtgtaggagtcgtagaaacaaggttcagtggttgagagaaacaacccctttttaatatagcatttttattaattctttaagacttttattcgttctttgagaattcacacgtacaatgaattttgatcctatcaatgccccactcttcccctgatccactaccaactcttcatcccctcccaactctgggttctcactgataaaaaaacattactaccgccccccccccaaaaggcaatttgtgctgcccacatatgcaaggatctaggccatgcattgtcgtggagatcaccctgttttaagatgcaaaagtcacagagagacgccctgcctcaaaaaaaaaaaaaaaaaaaaaagagtaacaatcaccttataaggcacatcaatcagcggccaaagtcataagatgttcatgctctgctattgcagaaatcgaatttccctttgaaaagtagaatccttaaccaccaaagacttcacgggctcccagtgccattccccatgtgacaaaagaataattcagaatttgattgaacacgtttttatatctgagtgatttaattcttgcagcagttctccgaggtcccagttattaaccccatttttccaatgacgaaaatgaggctcaggcaggtgaacaggcttcctccagcgctcccagaaccggaagggggaaaggatgccaaatgctgactgactcacaagtattattcacgtgcaagagagccatagacaggaataaatgtgcatgcctctgggagagagctcctttggggcatttcagtcattctcacaccccatgaacctgaagtcgcaagggggtttgaaccctggagtgaacaggctttggccaggacttctggcccggttctgttttccattcctggagcctcagggatgtcggtcagtggagagggtctggtcaggcggtaacactgctctagaaactgcggtgctgggggtgaggtgggggtgagggtttgccatcgccatggggatgcgatgctttccagggctatgtggccagcattgtcctctgaacaaggcaccgtttgttctgtagaaataagagggtgcttctcagcggggatttagtcctaaatcaggacccacattccaacaatgcccccttgtgcagtgggtgattatccccccccacacacccgggattacaagacttgtcttccagattcatagtaaactcctacgtatctttcctctagagtttttaaagagcctttggcatggtcgcctgtatattcatctcataacacgttaagattaaggttctgcgttgtcctgggcagaccccaggatttccacagaagccaaggagcaagggggaagcagtaggggcagcggagacacactgcgtgggacccccttttgtggagagaatccttcaagcagccaccttaggctatttcagattatcctagggtcaccagcgcagttattttccacattttacaagtggaaattgtaattgggtaactggagcaagatcacaccgctgcgagaggaaatgcgcaggattcccaggtggagtccaaacaggctcccacttccgcatcccttgctcatcctgaccttcagccttcaatgcctgcccggtttgaagcgcacaccaggagttctctctccccttcccatcccttcctcctcttttccttttccttattcgagtcttactttcttttcttcttcctttgcttttctctatcgaaaaataaaaccaatggagtcccatttctaatggcaacatcaattttttttaaatgtccctgggctacgaataaaccaacaagaaagaatagtgtgaggacactgagaaagtaagatttttttcaaagaccttgagcagataggaagctgtagttgtctctaactgaaagaattctaaggatgtcaactttctttttttgtttgtttgtcttttgtttttcaagacagcgtttttttctgtgtagctctagctatcctggaactcactctgtaaaccaggctggcctctaactcagagatccacctgcttctgcctcctgaggtctgggattgaaggcatgagtcaccaccacccagctaaaatgtcaatttctaaattaacccacaaggaggtaattctaacattctaacaggagatctcagtgcttgaaaactggttttagaatctagaatactaaaatgagcaaaacacacaacaaaggaaaagaacctgacttcaattttctaaatattctgacttaaccttaaataacccatattgtccagttacctaaaagtcaaacagaacctaaaggttaattcagaatcaaagctataaatgacaggatggttagaaaagcaacatcataatgagacaaactaatgattctgagagagctgtagtcctagaaaacatgagatttataatatataacatccaactgtgttaaattctaaacaccaaattcaaaaacaactcagaaacaaactggaataaaagatagcaccttggtttttattaatgtaattgggagggctaatgacagctggcccaagaaaaacacgtatttcaggagccattgacaaaagaccaacagttcccacttcaaaaacttaagagagcttgttacagatatgattggggtttcccccaaaagattcatgtgttgggatgctgggaggtggtaggaaatagagttagtgggaaggaagcttttaggttttatacataaatatatgtattataacatatgatctatattgtatatatttatatatcaaaagataccaaaataaaaagtggtaatagaaatcataatatatacaaaaccaagtatgtatgaacaactcttaaatcatcatagagagacaaaatataaaaatctaggtaaaaaatgaagggaaacaccacaaaaagcaggaacacaccacacacaccacacacacgcacacacgcacgcacgcacgcacgcacgcacgcacgcacgcacggtggcttatggctgtaatcccagttctcaacaggctgaggcagcagaattgccatgaatttgagaacagcctgaattacatgagtttcaggccaacctggatatggtttgagaccctgtctcaaaacaaaaaacatttcccagtactcatgaagcagaggcaggcagacctctatgaatttgaggccagcctggtctacaaatggagttccaggacagctagggctacggagaaaccctgtcttgaaaacccaaaaacaaaaaccacatacacacacaaacgtcttagggaagatgaaaagctgcttaaacggaaaatgagttggaaaataaccaacgagacatactttataaccagttgggtcttaaaaaacacttcagtgaagactgtgtagataatttagtggtaagacaattgcctaatggaaattaggctctggattctatttcccaaactgaaaaacattcactatattagcaccagtattatcagatgaaaacgagcagttccatgcagtgtgttaagagtatgaattaggggctggagatatggctcaggggttaagagcactgactgttcttccagaggttctgagttcaattcccagcaaccacatggtggctcacaaccatctgtaatatgatctggtgtcctcctctggcacgcactgcatacatgataaataaataaataaatctttaaaaaaattcttcctataaaaaaaagactatgaattagtacaattttcatggcaacttctattcagaatgtttttgtaatactgaggttccgatcaaaggtttcatgcatgctaggcaaatgctatagcatcgagccacatcccagttctcaccattagaactcttaatgctatttttctagacacctgacaacgtattcacaaagctggtggacatgaaatgaatggtcattgaagctttatttctaattagaaaactggaagaaagctccctgggttaaggaatggttaaatgagtaatgtccacatttactgggataatgtggtgactcaaagaagatgggctagattccaatcaccacataaagagactccaagggggaaaggcaagaaatcaagaactctaggcaaacaggctccgtttttttgtgagacttggtttaggcttctgcgatgctgtctttgggacccagagccttgtggcagactggcaggtactcttgcaaacaccttaggataacttttattcttcacacatctgtcgtgttgcttgtggcatttattgtaagcatattttgattatgaaaacgcaaagagcccttccttaacctggttcaagtgaccacagcaatgttattatggttgtcatgtgtccagtaaatatccccaggacccagatgccaaaagagaccttgccactcctctgaaggcagagggtggaggcccaagggtacaaaaggaagccaatgctgacctgcaccaaaagaggggtgggtggagcaatagcctcttcctgttcttgcttcaagtcctagctatctatgagatgcttggtccagtttaagcaagactctgtccttcatttcctcttcggcttcggcttcagcggaccagcttcctgaagcaggaagggtgttacccaaccatgagggatccattttctatttcttggtaaactctcttctatcacagaggaagaggactatgtctattcttcttcctttccttcaaaaccttaattcttctttagctgaaacatagggagaaggagaggtggggacacttcttaagacatatttgtagaatagatttgaaattcctaatttaaaaatctctagcccaaatgctccaaaatcttaaacttcttgagcactgacaggacactttaagtgggaaattttgcacagtgaaatttggtttcatccacagggctatttaaaatattgttataaaatttccttcatcctatgtacataaactgcctatgaaacatcaatgaattttgcatttggacttgggtcgcatccagaaaacagctcattatgcatatgcaaatattctaaattgaaaactttggcaacccgaagcacttatgaccccaagtattgctggcatggaagggacatttaacatgcacaacagcacaactggacattgcactcggcagcatttttttttttttttctggcagaggagaaaaaaaaagaacccaaacccttagaaaattaaagacaacatcagtacttagaacaacattatctataatatttcaagtcaacttattttgaaccttacactccttccttctagataggcttgcgtttcctaattattttgtactattttcagatttttctcccccatggctattttgatttgcctaaggctcacaggataactagttagaattaaaagtgaaagtgacctgaaaaaagaaaggaaaagaaaaagaaaagaaagcaaaagaaagaactctgcacacacgaagaatgagcagacttgtgcctgcaacagaatgacctatagcctctactgtggtggtggatgctaacctcttagatcagaaagacatgagttttgtcatctgaaaattaagtaaattgtgtgacatgagttttcatttcccttccactgtaagagtcttgtgctaattttctggagtggggacaattttcagacagaaattagaaatagcagtgacaacattaacatgaacaggcagcatgctgtaagttttgactgcgcgccaagaactaggctgtgttctttgtttgtttgtgtgtgtgtgtgtgtgtgtgtgtgtgtgtgtgtgtgtgtgtgtgctagtgtgtgtgcatgtgtgttactacattatcttgcttgagtattacaatgattgttcatagtatagataattcttgccattacatagatggaaaaactgaggctcagagagaggaaaagagctttccctgggacacgcaactgcccgagtctggatctaattctgaactgtgcacttttaatccaagaactggtgataacctttggtctgggtcatcttcaggatacctattcgtagtccagttattactgctgggttgggggggtgggtctgtggaaagaggaggcaggcaagctcttcagttgtaggaaatgaaccaaaccaaaagcttccactccctggaatgtgcagtctacaaggctaacacatgtcatattaggctagagatttatagctgtgagaacattctgaaattttccatgaagatggggagagatttgaacagcagaagacagatgactctcccaatagagtctagaaaagatacttccaggtcaggtcccttggccatcttgggtgccagggattcacttattgtgtgattaagtaaagggtttatatttccagagaaatgattctaaagcatttgatgtattacactaaaacacatgaaaaaaaaaaaagagcctaaaagcatttaggagcaatcaaagcatctggaaattaagtttcaatttcttcatttgctaaactcttcatcaagtaaatcagtaatttttttaaattcatgaatatgatactcagagaatttaaagaagcaattagctttaaaacgcatatgcatttcccagaacacttagtatatttacaactgaaccatttttcagttgcctcatttctctgccttgacttagatgtgtgcctgtgaactccatcttgggtcatgctgctcttgggattttggcaggtgaatggcaatgcctaacaggccagaaagacttaatggataaaagccataccgaacatttgtatcgagattctggcatatggcagtgggcagtcttttcttattggggattaggtatagcagacattaatcaggttgagctgaagaattgccatcatgtcaaggtaccatcaatttcagcctctaaagagtcacagtgagagattctcctgctggctgtggtggcacatgcttataaacattcaggaagtgagacgggaaatggtgagtctgagttagcctgagcaatttagtctccaaaaaataataataataataataattttacatccaagcaaccttttgacttcttcacttagcatttttactgtactcagggccaaatccagtacagtgtagaatatgcagtagtcattttatctttcagtgaaacccaacttcccaaccctagccattagctatccatggtttgggcttgaaagcctctctgggtaacgtggatgatgctcagtggtgacccccatctatgctgttgcactaaccttgccgagatctaagcaacggtgagtgagtgtgtttgtgtatatatgtaaagaggttgcaatcatgttaggtattttctatattgtggaaacaaaggaagctgaggtgctgtttgtaccttcaagttcccaaacccccgttcaaaagtcggtctcattctctacacacaaaatgagtcatagaagtcagaatgactctgcaagaggaaaacatcacattcagagtgtgaggtcacatttcaaggaaacaatatttagccatgtagagccagaacccaatgcgcttgagtggcaagataatgcattcgataaattatgagaccaccacttacttgaattatcaagccatactctaattcactatctaaatattaaatccctttattgcttggtgacttagacctgactgagtaatttcagcactcaaatcggaacatggtgttctacacagtcagtgtgttgggcctagaagggactatgggagactctggtttatgaatgagaaagcaaagtcgcccgagttcacaagttcacaagattagttggtggatggaccttggaccctaaattttctgacctttgatctagaggcttttcattcctcccccgcagtagccttcaaagttagtcaccacattctcagagtgtcccatgatacctccactccatgtttctccacaccattgtggcatttggaagtctaaatttccttggtgtaaaacctgattttctctctgtgctctctgttttttgtttgtttgtttgttttttgtttttgtttttaacatttagttctgaaaaactgcttagcttccaaaaccttgccctcatctgcctcactctgttgacaaagtaatcaacctataatgtaactaattatgcctgagctgctcaaaactcttcatacgttgacactgaattgccattttggagaaaatcttaaatggctatcccctaaattgatgttgccactaaaggaaaaactgaattttcgagttaaattctatgctctctattattgaggcagaatgaacagatagaggtaggggtgatgcctcacctcactcaagattgtactccccttccatgggcctttatgtaaaatgaatgcatcgcaagcaacaatgagttccagcgtctagtctagcagaggtcactgcagaggtgagtaatcagaccctgaagtctggagggtattcttttaagggctgaagtatctctgctgccccggggttgagtgatccagaatgaatcgccaccctgagcttcacagtgtctctgaaagatgagcacgacagtgtctgcctgccagctgtgctgtggctgagccactgagggcttctcacagcactcagggtaaagtgttctgggaaacagcctcaaggctcttccgagctagctctctcctccttctccttcttagggtcacttagtgcttcaaacacatctcttgcttgtcctctattccaatacattttttttcccctctgcttgggcctctgttcctgatttttttttttccctctgcttgggcctctgttcctgtcgttggctgtgtggtgacattcttctctgtattccatctcattctttaggtttggatcgaaatgacacgcatttggagagtttcctcagttaagtgtgtctccctgcagttctctgcttggttcaatcactgttcagtgtcccacatggtcatttataccttttatagtgtttgtcaacacaggaatcatacatgtaaaaatacatttgttttcctttattattccagactttgccaacaagattgtcaagttcttgaggtaggaggcatctcttataattttggttgtgagcctatcctttaacagctgagccatctctccagcccaggaagcacctctatattgtctattgttgtgtttcagacctcaagagggccaacaatactgtcaccaactcaaaagctcacacacatacaaaagtatcatctactgtcaccctactgggcaatagcacagcaggacattttgcccctaactggagctcagtatccattggccagcctatctatctctatccttgccttcggaaagcaccattctccttttaatttctctgaagtcagcatttcagatcccatttatgagggagaccattagtactagtttttctgttcttgggttatttcatttaacccgatattgatctttgattctatacacattgtcacaaatggaagacttatttttttttttttgtggccaaatagtattccattatgttaacacccatgccacattttcttgattctttcatcactgataagattaggttgtttgcatctcctagctaatgtgtgtagtgctacagagaggggtgacacactggtttcactttctttggatgtacaccgaaaactgagattgctggaatctatggtagtcctaatttgtaggttttttgttttttttttttaatctctgttctgtttttcatatgactatgccaatgtacattcccagcaacaatgtacaagggttcccttctctgggcatgttcaccagcactcactgtcctgattgtccttcctattagaatgaagtaaaatcgtactgggggaaatttagttttataagttagaaacaagcaattaaaaaaaattagaaccccagcactcgagaggcagaggcaagcggatctctgtgagttcgaggccagcctggtctacagagtgagttccaggacaggctccaaagatgtagagaaactctgtctcaaaaaaaaaacaaaaacaaaaacaaaaaacaaaaaaaaaaaacacagcacacccggagccagggagccagaggaaacaaaagctggcgctgccatgggtccccagtcctgccgaggcgccaagcacacagagggaagcccacagcctttcgaagctcatgttccaggaactggggaccaagccctctgattgccctgtctaccctttgcacttcatggacttgagatctgaccctgcacctgcctgttgccttgtgaacgagcacctgccctgtcccggccggcaccatgcccatcctcaagcagctggtgtccagctctgtgcgttccaagcacctctctcgagtgagcgagctgacctcacggctgagatgatcagcgccccgctgggtgacttccgccataccatgcacgtgggctgggttggaggtgcctttggggatacctccttcctcaacagcaaggcaggtgaggctgacagtgagtccctggatgagcaggcctctcctgacacactcctcgatgagcagcctttggggacctgacagatccatccattgtgcccaaggccagctgtgggctgaaacacgccgagtctatcatgtctttccacatcgacctggggccctccatgctgggcgacgtcctcagcatcatggacaaggtgagtgggacccagaggaggaagagggtggcggttaccgtgacaaagaaggccccagcagcatggtccaggctccccctttgctggaggtagctactccaataggaagacaggaaagcaaggccagctcggaccaggcctccatgctgtccccacatgctctggaagatgacaggtgggcagcggcagcccccagccccagctcagcaagcagtgtgagcagccacaccatatgggacaacagttccctgtccagctgtacctcaggcgtcctggaggaatgcagccgagcttttcgaggcccagatagggcccggattgctgccccaaggcagccagacgaggaattctccttcatggatgaggaggaggaggaagatgagatccgagtttgaggctggacagaaagttcacagtagcttccacaactctgggctgcatcatttccctgctgctgccttcactgtgacctttgaccttcctatgtaggtgcagttaagagcctctttggagtagaccctggacctcacagattggggtgccagggaggtagcatgggtactgatggcctgactctgacctgttcttcctctactgcagcagcctgggacagagctgtgtcccagcaggaatctgctgtgctttctctgggccctttgcttccagcctggcctcagttggatgccagatgatagtttgtattcctgcagcaatgtcagggcagccaggtgtggccttctcctgaaggcctggtgtctagtgactaccagggagctatatgcagcaggaggcaggggtgaccacatgtccgggctcttctttctccaactccggctcctcactggaagcctggtgctctttgggctcagttggaacaggggacaacctcaaccaatacactaaatgtagtccttcccaagagtgccaggacagtgggggacagaaggaactcccccggccctcagcttcttgtgttttcaagaaggggcccttcttcagtgacactaggaacaggaagggctatctctgccctacaggtgcatttgtttgttgttgttatatgtttaaacatgaatagagctaccaggacaatataatcctgttaccgagattgtcttggtggcacagtgactggtagcttactcaaatctgggtgtacagatcctgttcaggttgaactggggcgggtgggggggtgggggtgggggacagccaccaccagtgtttgtccatgaaccccacctctatagctgttaacagctgaatgaagactatgtaggagtgttctggaaaacgatggttaaataatgcattgttccctggagtgtgagctgtgtttttgactgggcgtttccctccccctgccctactctacgggggacagtgtctccttccattctcagcctctcccaactgcccagaccaggactcgggtgggctaagggccaggctgagcaagaccctattcagtttgaattccaggttaacacaagtgggtttttgtttgtttgctttttgagacttggtctccctctgtagtccatgctggcctcaaattcgcagcaaagccttcttcccctaggagctgaggttacaggtatgcaccagcggccctggctgtttgtctgaaatctgttttgctcggctcctgtaactctacccagaacatgggtagaagcaggggccagagtcccaggggtggtggttcattactttcctgtgctgggaacaggctggcccacctcctgatctagcatagccagtgggaatctggggagagagcaagctacattacaataggattctggccagatggtggcctgccatggactgctctgattccaaagtcctcccagattctgatccggaaacactcactgggctcctgactggtgctcctatgtaagtaaccattgacagagtcacagaactgtgcctctggccagcagcacacacacccctcctgatctaccctgtcagttctagactttaaactttgtaagtttttccatgacattgataaagcagtaagaaaacattaagatttcctcctagcaaaacaaaaacaaaaacaaaaaacaaaaaaccccaaaacctaaataaataaaattaaggaaataattcctttccaaatactatcaaaaaggcccaaaatacttagaattttatttaccaaataactgaaggactgtacactgaaacctatgaaggaccattgagagaaattaaacaaggcataaattcataaatgcagatgttcatgtttatgctctgggaagactgaatagcaagctgccaattccctctacattaacctactaattcagcaaatctttataaagatccaaaaggctttttctctagaaatgccaagcagatcctaaaatctgtagagaacacaaagaaccccaaacagccaaaaccactatggaaaagagcaaggtcagaagccctgcctggcttggcttaagtctcactctgaagctctggtaatggagacagtggtgttagcacaggcaggaagagatcagtgcgtcagaatccagaagcaatcttatataattttggccaatgtgttttgaaagtgggttccaaggtaaacaacaagataagaatttcctttttagcaaatagggctggcaaaattgcatatccaatgtggaatgaaggcaacccagcccccccctttgtcataacatagcaaaaattcactcaagacaaattatggacctcaatacaagggttgaaagtataaacttttcagaaataaaaagagatgaaaatcttggtgaccttgggctaggcaaacatttcttagatgtgataccaaaagcatcctgtgtacataaaaagttgacagaaggcattcatcaaactgaaattttttttggtcttcaaaggacaacattaaaaagatgaactgccaagctacagactgggagaaaacatgtaagacattcacctgataaaggacttgtatccaatacatgtgaaaaacccttccaactcagtatcaagaagacaaacttctcagtagcgggcaccaaaagatatacaacttgcaaatgggaactcaaggagatgcaaaccacttactatttctcattaggaaaatgcaaattaaagtcaagatgaactgggactatgtacactctagaaaagctaaaatccaaaagctgatgataaacgtatcagaagagatgaatgggggaactcatacaagaaggagaaagtgaatgtcgtgtagacagtggagccttgtggaggaatagcatgactttcttctacctgggcaagtctcccaatggatttgccaggctccatggtctcaattttaaaacaagaggaattgtattcaaggaaccacatattccttccctccaagatgtaacgaggtggaagggagaggaagtgaaataggtaagggagaatgtctgtcagaaggatgtgtgtgtggcagtggaaggcctgatgacaagggaaggaaacagccctgggggggataaccagggttgctctcaaaatcccatcccagaaagactgggtttgaaaatagtgacagacaatacaaaatgtcagaaggctttgatacaaaagctcctggtatagtcacacatttgggtaggaatgtcctccagggaatttcaccgcaaacgtttaatacaaaatagtgaaaaattgtcaagggaaagtaagaaatggatcaccaacccttgttgtactgtgaatttaacagctcacatgtatttatttgttgcaccaaatccctactaatttaaagtattcttggtgcctgaaaattcatactcatctagctccagtacatatgcttttaatttttttaaacattcatttggggtgtgtgtgtgtgtgtgtgtgtgtgtgtgtgtgtgtgtgtgtgtgtgtgtcctcacacaagtgtaatgggatccctgtggagattagatggtaacttgtgggagctggctttctaccatgtgtgtcccaaagatcaaactcaggtgtcctgctggaggtaggtgctttgctcattgagccctctctcagccccagtaagtatcttcatgagacatcacacaagtgtaattccatagagatgttttaggaggaatgtaaagaatctctattttatcagaaagaaacatttttaatagctatttatatattataacaacccagatggattcaaattttggcaaaattagcatttttatttttcctttgtctggtctatttggcacaatgaagaacatgccatttatttgacatggtctttttttatgctgtataagcttcatatggcattgaattggtgaggcttcaggaatgtcaccctagcatctgatggcttactagagagctttcagatcattagaggctactccatttgtaggttcaaagacacttaattcacaatgttcaaattaagaaaaccagatattaatattccttttcacttataaacatgtcttattcaaaacatggccagccaatctttgtacactgtaaatgtgcattgcttttattattaataaaaagctgattggctgataactggttaggaggacatgggtgagtcagcctgacacagagagaattctgggaggaaggagggcagagtcaaggagacaccagccagactcagagggaacaggagatgaatgtgccatggtaataaaggtaccaacaggtggcagaacacaaataaggaatatggggttaacttaaaatataagagctcattagtaaaaagcctgagcttttgaacaagaatttataattaatataagtttctgtgtggtaatttgggaagcaactgccaggtatttgggaactggtgggtgggacaggaaacatccagtaacaaccaagtgtgctaactgccacagaatcaaactagaactctaaaggaagcagacagatgcccaaacaagccatcaccaccaccacccaaaaaaaacccaggaaattctgaatcagcatgatatgaaagagggctcatgaccacacatgctttaacattaataacctggtgtttacccaccccgtttccccccagttttatgtttctatgacctccttacaaaaccctcttgctatggcatgaatgtgcttcctaagttttcctgtagaaaacatatccttcaaagcaacattattaagaggtggagccttgggctggagagatggcccagtgattaagagcactggctgctcttccagagaacctgggtctgattcccagcatccacaaggtggtttacaaccctctgtaactccaattgtaggggatcctgtgctgtcttctggcctctgcaggcaccaggcatgcatagggcaagcaaatcaagcaagcaaacacctatacacaaataaaaaaagaaaaatattttttaaagtggaagctttgggtggtaactagggcactaggtggcgccccccttggtgggttaatgctgttattagggatggctagttattacaagactggattgtcatgacacatctatgtggtaactttccaaatcacagtgactaaacacaaagatccacattttattatgcttcatgttcattccaagttatcgtagccctgcctatgtgtctttcattctgggactcaggctggtgggtcagccttcctacctgaatattactagtcttatgcttgagaataaaggagaaatatcaaaccacaaactggatctaaagtgagtggaaatagtgcatgcctttctgctcacatttcatccatcaagggaaatctcctggcctggcctagcctggcatcagtggcaaagggaattaccaccatttttaggttgctagtattccggagcagatgtttacatgtgtggtgggcagcagggcattcagagctctttgccagctgtcacagttaggttttctattgctctgaagagacaccatgaccaggggaactcttaaaaaggaaaacatttatttggggtggctggcttacaattttagaggttcagtccattaccatcctggtgtcacatagcagacatggtgctggaggaggagctgagagttctacatcttggacagggaacagaagtgttctcagacactgggtatggctcgagcctatatgagacctcaaagcccacctccacagtgacacacttcctccaacaaggccacacttactccaacaaagccacacctccgaatagtacctgtccatttggggccattttctttcaaaccaccacaccggggtacatgcaattgctgaaacatgcctgtttctctactaagaagtttgcactgttgactggagggggctgaggtggttaattcgccctatgctggtcgcctttttaatattttctttattcttattctaccacaggttgattgactccagactcaattcaaccttgacagcatgagaccacacaggtggcaaaattttccctcgattagaagctgctcagctgcccaccctgagctctctttgcaacccatgaagcttctcgattaattctatttttgattgttttttttaattatcctggctagtcatttcatagtagactgcaagaaaattctatttatctcacctgtctttctaaagtgaccttatctatctatctatctatctatctatctatctatctatctataaaaaatcaacctgagttttggctgtctggcacggttgtcacaattctgcaacttttttctacttgtctctgtaactaaattcccccacctcaaggcagtgaggataggtgaggtcatgtttatagcaattgtgcaagtttctctgactcatctgccacacttgttcatgtaaaactctcctctgacgtcaccaagggactctccagtttttgttgttgttgtttgtttgtttttgtttgttttgtgagtgtatcaggagagggacctggagcaagaagtccttttacattattctgtctgggtccccatcctgtggatgtcccactgctgtgagacccaaactgccactctttctttctcttttcttttttcaaattgtgtgtgtgtgtgtgtgtgtgtgtgtgtgtgtgtgtgtgtgtgtgtgtgttggtgtgcatgtggagaccagaggacaacttgaaagaattagttctctccctccctccacagtctccacactgtgagttctggggattgaactcaggtcatgaagtttggatggcagtgagcaccagtccctgggcttggaccctgatgtgcataggaaggactgagctagccgggcaagagcatccgacctctttccagcctgactataattagcttcttcctgttctcaccgctatcctgacttgtcctctatgatggactgtcctcttcaagccccccaccccatctgctcccttatgtcggggtgtttcaatcacagccacagggaaggaaagaagttccctggtctctgaaattttaggcctcaatttctttatcattttagaaaagtagaattatacattgttactaaaaacaaaaccaaaaaaccctaaaatcttgctggctttaacaataagggattgttttggactctggctgaagaaagcctatgatctgaaatcctgatgggtttgggcttagggagagagaaagggctgtggagggtcccacatatggcagaaataattccaacaatgctctgtgtcagatgtgttttgacatcttggttttagttttattccattaaatatattttttttatttcccctgtcatttcttctatgccttgtgggttatttagagggtgttgtcttaattctagatcatttgtcaactgtcattctgttgccttcttctactttatagtcacagaatatgagctgcatgatttcaattctaaaaaacccaacaaaacagaaaaccaaacctgaagactgtgtcttgaccttgataaggttatctcttggcagtcgttccatgtgcatttaaacaatgtatgttctggagctggacaaagtgttccagaaaagacaattaactactaaagagaattctacagcccttttgacacgttgcatatttattttattcactactagagtgttcaatacagtgtggatttacttctcatttagttctcttggtttctggttcatgtatttttgttgttgttgttgttgttttgagacagtgtttctctgtgtagctttggagcctatcctggcactcactctggagaccaggctggcctcgaactcacagagatccccctgcctctaacagataacgtaaatcatggtggagatcaaatatagaattctcttgaattatttgagcaatctggcatgtgacaggaaaggttgggggctctattgggccatttgagacagagaaaccgggttgttgaagagatctcgctgttgtttgtgtaactatgaaatgtggccacactgggaagcccttacccattgatgaagttagtaccctcatgattcagtctcctctcagtaataccatcagaacagagcaaacacacagccttttaggaaagacacttcatatccaagccataaccaaagactctagaactggctacctcctccctaaggtagaagaaaccttctggtctagcttttgtccccagacattccgcagtttggactacaattgccacctagcggtcattggggaaaccacagtcaaccagagaaactgagctgatgctgtacacctgcatgcttgggttatgaaaataaacttgttgtaaaggtcacttttagtcgtgtctgtcccatgcagtcatacatctttccagtgcatccatgtcaagctggtatcatgtagcctcgtaaggaacacagaattctaatgaccaatgctaattcttgtttttattctccgactaataatgatttctttttgtttgtttttgttttttgagacaggttttctctgtgtaacattggagcctgtcctggaactcactctgtagaccaggctggccccgaactcacaggactgcctctgcctcccaggtgctgggattaaacgcatgagccaccacctcctggcgtaaagatttctttttggctaagttaagtcagtgtactaccgcttctctgcagagagctgtagtggctgcttccagatcggaaagatttatttgtctgatacaaatggctcagtggttaaggtacagctcttgcagaggaactgggttcggttcccagcacccgtgtcattctactccaaactgcccgtaattccaagtccagggaatctgacaccctctgtgatctcctggggtacctgtactcacaaatgcccacagacatttacatatactatgtgttagagataaataaaataaagatgaatatttttaaaagaaaaaaatgtttataaatctagagatgtcaaaaaataagtacgtgcgttggtggcacacatctttgattccagcactcaggaggcagaggcaggcagatctctgtgagttcgaggccagcctggtctacccagagagttccagaacagtctccaaagcaatacagagaaaccctgtctcgaaaaaacaaacaaacaacaacaaaaaagtaaaagctcattgttttactcccttagagaaaactatagttggcatttttactcccttagagaaaactatagttggcattctgttgtgttgttttccagaaaaaagctcaagaccccaagaggtagaaatgatagtggagatgaaggtgaggataaaacagaaaagggattcaggagggctaggcatggaggtcatgggagaacaagacatgagagacccggagatggagtggtttctggaaagcagcacgctggtggcagagaggggtgtggtgggcatctgagcaccggtgacagaaaggctcacagtggaagctgctggcagagaggggtgtgttggcatccaggcagcgtttagcacctttgtacaggttgtttgtcctctctgcatttgcttctgctgagctttcttgtccataaaacgaagacaataatatgaacctcttcagattcggtgaactcagaaaaatacgtggggcagtgttgatctaaccctcatggatacagttcataaagatagagtacaaagagccgccatccagcgtcctctaagacttccattcacccaagagcacctgccctttaacactttagtaaaaaggtggaaagtgccattccatctgccacgggaggctggagtgctcctctaccctcagcttcagctgtgatccctccctgaggctggtttcccacctctcccccatgccctctcgtgccacagtcggcttgcacttggagcctgtgtctgttgggatttccgctcagtaccattatcttaatgcagttacatccacacagtgggcttttactgagggcttggcaccgtgtggcaaacatttctctgcttatgtctgttgagaaaacatctccagtcgttgcacttactggggagttcatggcctcttctctctaagtccccaatactcatttctaaagtccattttcaaacccccaaatttctaaccctttccctcaaagagctctagttcttgttttcactaatcctatttttaaaatataagtatatgttttgaattctctgttaagctgagggccatcttgttttagttctctaccggctaaaaagcagatggattttgaagctttttttgtctatataaaagaaaaaaaatctatagattgccagttggtgtcatccttgtagatctctggaaatctccctagtgccagatctctcctcaaacatataatggctccctctgttatgatatctctcatcctgctctcctttattcttccccccactcaaccttcctgctcccctatttcctcctctcccctcctcttctccccctcacattctcccagttccctctcccctactctcatgctcccaattagctcaggagatcctgccccttccccttctccggggtccatgcattcctctcttagagtccttgtttcctagttcctttcatgatgaggactgtaggctggtaatcctttgctctatgtctaaaatgtatatatgagtgagtacataccatgtttgtctttttgtgactgggttaccttactcaggatggtttcttctagttccatccatttgcctatgaatttcaagattccgttgctttttttccgctgagtagtactccattgtgtaaatgtaccacattttctctatccattcttcagttgaggggcaatctatagaaaagtcagatttgtaggtatgactaccttaagtgggagagagtggtgtagatacataatgtgtggtagtttgaatgaaaatggcaactataaactcatatatttgaatgtttggttcccagttggtggaactgtttgggaaggattaggaggtatgaccttgtttcaggagatgtgccagtaaggtaggttttgagttttcaaaatccatgccatgcctagtctctctgtcgctgtctgtctgtctgtctgtctgtctgtctgtctgtctgtctgtctccctctggtgcataagctctctctctctctctctctctctctctctctctctctctctctctgtctctctctctctttctccttccaacttgtgagtaagatgtaagctttcagctacttctccagcaccatgccttcctgcctgtgccatattccttgcaatgatggtcatggactaacattctgaaactgtaagcaagcctccaattaaatgatttcttttgtaagttatcttggtcatgctgtttcttcacagcaatagaaaagtaactaagatacaataatactgtgatgtgttactcaaccctatcctgcgctcctacaaaaatgaaaacaattgctatttgattgcaaagaattaaatttccttttttgctgggtacctgggataccaaggacaaagacaccacatttattgaaagctagaaagtaagaatgggactggcaagatggttatcaattaagagtatgtgttgctcttgcagaggactaggttctgttgccagcacccacgtggtggctcacaaccatgcacaactccagttccaggggtcctgacaaattcttctgacctccgaatgcaataggcacccaagtggtctacatagaggcatgcaggcaaaacagtcatacacataaaataaatgagtctacaagaaattttaagtagcaaagagtcaaagaagcagggagacagcagtcccaacatcagaaaagatagtgggaaaactgggtgtggccatgcacattggtaatcccagcacatctgtaaacccagcacttgggaggtagaggcagaagatcaggagctcatggtcattctcagctatatagttcaaagccagcctgggctgcatgagatcctgtatcaaaacaacagcagtagcaatataacagcgatgaaaggggggaagaaaagatacagcaaagacctcctttaattctatcttgtttctttgttttgtgccagggtctgatatagtttaggttggtctccaactgatcttccttctcgctatctcccaagtcatgggattatatatgtacatcgtgacacctgattcttttcttttcgatacagtgtctatattagatcataagcaatatatcaccatactctgtgtgatccatactggcttggaactgtttttaaaattatttttactaaaatgttttttttctatttgtgtgtgtgtgtgtgtgtgtgtgtgtgtatgctggtgcatatacatctgtgttacagcataagtttgctgtaacaaactcatacccataagaggacaacttatgggtgttggttttctttttttaccatgtgggtcctaggaaccaaatgtactcaggtcatcaggtgtggaaaattctattacccactgggccatcttgctgatcttggcccagaacttgtaattctcttgcctctagaggccttccaatggatggcaggtgtaaagtagctcgccttgctttctgtctccataccaagaaaacactccaccctttgaggtgcatggagagccaaatattgactgcttttgtgcacacataaatgtgttgcttgtattccatcaatggccgtctgtggaccacagtgtataccccagacaacgctgtaggatctgtgtgaatcacccatcaaaatgctccatgacatactcctccactcccacttggaaggatggtcacccctaccttacaaaattattcacacccagtttgtgccccaaatcctgccctgatggcttctcttcctaatttttccaagactcacagtggataccacacatagcagtatacactgccttcctttgtcatccttcacgtacctgtgaaatggtccctgatagaaaaataaagtctttcaaatgtatcatgaactaatccttatgctattaaaaatcttatgcagggctggcaagaatgcttagaaggtaaacattcttaccaagcagaattggtaagacatgagctctagctgtggatcccatgttgtcctactttgctttctatagctctaataaacagcaacttgggaagtcaagggtttatttggtttacacatcctgatcacaagtcatcatgaagggagtccgggcaggaactcaaggcaagaaccagaaggcagaaactaaaacatctttccatggaggaaagatgcttattgacttgctcccatggcttgctcagcctgctctcttctagcacccaggaccacctgcccagtggtggcagcacccctagttatctgagtcctcccacatcaaacattaatcaagaaaatgccttatagatttgcttataggcaatctgatggaggtgtttgttcaattgaggtttctcgtcccagattattctagcttgtgccaaattgacaaaaaaattaactaagataccagtaaaggtgggagaaccaactcctgaaaattggcctctgacctctacatgtgtaccatggtatgtgcatgtgtagggtaaaagggcccgccaaagatacccaccctgtctctgaaacccaagccagagaaagaaacacagtagccctgaacccagagccaaagaaacacactttggccctggaaccagggccagtgaaggaaatacattctgaccctgaaaatagacccctcaaatcagagccagtgaatgaaatatgccttagccctgaaaatagagcccaaaggctaaaaggggccaatgaaagaaacataatttggccctcaaaccagagctaacccttcccctgaccaattaaaccaaccaatccttgagcaggaaaactaaccaatccctgagcagaaagtcttcaccctgggaaaactccaccctgggaagctctatataagctcctctgtctgttcagtggtgggctaccctttcccgtcctggcagaggcagccactctcctggactccttcccaaataaatctctttctttttcttttcttttctttctttctttctttctttctttctttctttctttctttctttctttctttttttatatgaattgcttcttttgggtatatgcctaagggtggaattgctggatcttgtggtagactgattcccattgtcctgaggaatcgacatacagatttccaaagtgactgtacgagttggcactcccaccagcagtggagaagtgttcccctttctccatatcctctccaacataaactgtcattggtgttttttttttttgttttttgtttttgttttgaattagaaacaagattgtttgacatgtcaatcccagttccctctccctcccctcctcccctaccacctcctccaactaaaaccctacctatcacatatccttcctgctccccagggaggatgaggccttccatagggggtcatcagagtctatcatatcctttgggatagggcctaggcccaccccctgtgtcttagctcagggagtatccctctatgtggaatgggctcccaaagagcacacctatactagggataagtactgaaggtcctgtagatttctgaggtttcctcctcactgaaacccacattcctggggtctggatcagtcccatgctggtatccccactatcagtctggggaccaagagctccggttgttcaggtcatctgtttctgtgggtttcaccagcctgatctggacccctttgctcatcacttgtccttctctgtaactggattcccgttcagatcagtgattagttgtgagtgtctgcttctacttctaccagctgctggatgaaggctataggatggcatataagtaagttatcaatctcattatcaggggagggcatttaaggtagcctctcctctgttgcttagattgttagttggtgtcatctttgtagatctccagacatttccctagtgcctgatttctctttaaacctataatggtgtcacttggtttctctattatggtgtctcttatcttgctccattcttcccctgactcaaccttcctgctctctcattggttgggggagtcttaggggaggaggggagggagagggaactgggattgacatgtaaaacaatcttgtttctaattcaaataaaaacatggagaaaatatagttttggatgaagatcttctttctctggtgtggagctgaacctttgctgagatgtttccttggtggtggtgggaggtgctgagcagaaaaaataacctttgctgagatgttcccttgttgggggttagtgagcagaaaaaagtaacaacttgtcgccaacttgtcacagagatgaaggagattgctatatttctgcaggggtttcccctttagcagagtgaagcagaagaaataatatcttcggctggagcacaagaagaaatggatagctctgctaggatattcccttaggggaacagaggagagctcagctgtaacagctcttctccctctcagaggagcaggattgttacattctgcggggagaatccatcaatccacaatccatcttcaggcatagcctggcttcctgatgagtcaggataccttgccctccagagctgtaacacttgtacacttgcagcatgcccatccctacacagaccacacacacacacacacacacacacacacacacacacacacacacacacagagagagagagagagagagagagagagagagagagatattaataaacctgatacaaactttccagttcataattttttaaatattaattagaataggcagcatagcaacctatcaccgtctagaaattgaaaacatccaactatcatttgtaagattaaggtctctttattccagaagacaccaaggtaaaacacaggccagagctaggttatagaacccagccagcgcggccagaacaaaagggccaaggtccccacgtgcagccccttaagaagctcccctacgtcaccccggctttcctttaccacgcccttatgggcgagtccgggtccacctgctacctgtcccaggactattgagcggggctagggtgtctccctacaatcattattatttctgcttgcttgggaaagggacaagcttcagctggatcctctactcagggtgtcacaggctgcagtcaagctgtcagccagagctgtaaatcatttgagacttatggtctgagatggttgggatccgttagcctactgcaggtgtgtcaaatggcacacgtatgagtagcataacagatcagcagcatttctatgccagcatcaaacattgataaaaaagttgccaatatcagattctgcctcaagcatgagtggccttttaaaaaaaaatcttctgaaataatgatggcaatgccgccgctgatactgatgatgaggagaatgtttcataaaccctgtctactgaagacaaaatccccagcagattaaacttctgatgatctggcatgagtttgcctcctaaggctggaagagttcagcaacttctgtaagagattgtagagaaaatctatgatatccacgcccatgtctgtctcccaaggcctcatcttctttatcactgtgcccttggaatggcattaatatgaaagccaattactgcacattaggttttatgaggtaaaaaaacaacaaggaaatgagagagcagggctggggcagaaagtgtattgctcaccacctctagaatggctgtattgcaatgtaggcacaccttaataaatgggcacacttagtataagcaatgtatcctctttatcatcattaataagaatgtgcttgcttgtttacaaaggggaagaactgcttgattttttttaaatgagagcctactgtacttattattctttttatttgtttattgagctatacattttccccatttccctttcctcctctcttctccccttccaccctccccgctgccccccacactcctaatttactcaggagatcttgtgttttttcctcttcctaggtgaatccatgtatgtctctcttagagtcctctttgttacctgggttctctggggttgtggactgtaggctgattttcctttgctttatgtctaatatccacttatgagtgagtacatattatatttgtctttctaggtctgggttgcctcacttaggatggctttttctagttccatccatttgtctgcaagtttcaagatgttattattattcttatttttttttacagctgagtactccattgtgtaaatgtaccacattttccttatccattctttggttgaggggcatataggttgattacaggttctggctattacaaataatgctgccatgaacatagttaagcaaatgtccttgtggtatgattgggcatcctttgggtatatgcccaaaagtggtattgatgagttttaaggtatattgattctcaattttctgagaaaacaccatacggatttccaaagtggctgtacaattttgcaatcccaccagcaatggaggagtgttccccttactccacatcctttccagcataagctgtcatcaaagtttttgatcttggccattctgacagatataagatggaatctcagaattgttttgatttgcatttctgtgatgactaaggatgttgattatttatttgtctttcagccatttgaaattcctctattgagagttctctgtttagatccgtacccccattttattggactatttggtcttttttatgtctagtttcttgagttctttataaattttggagatcagtcctctctcagatgtggttggtaaagatcttttccattctgcaggatgccgttttgtcttgttgaccacgtcctttgttttacagaagcttctcagtttcaggaggtctcatttattcattgttgctctcagtgtctgtgttatgtttaggaagtggtctcctgtgctaattcattcaaggctacttcccactctcttttctatgaggttcagtgtggttgtttctatgttgaattctttgattcatttggacttgagttttgtgcatgatgatagatatggatccatttgcattcttctacatccagttacaccagcaccatttgttgaagatgctttcttttttccattttataattttagcttctttgtcaaaaatcaggttgtacttactattcttaagtactgtgagactgtgtctcctaggaatgttagatgctacactcataaaaatctcaccaatatgactacttaaacatgagctgaacaaaaatgacacaaatagacatgctaacacagatggggtgtagggaaggactcacaaggcctcaactctacacaagaactacaggcaactcagaaatgctgaaaggtaaagagatagtcttccccagggaagagcacaccaattgcttagccaatgccaaatggtcaggcctgaaaacatacataccagtaacattatacagactgtgcaggttgcaattatgtatttaggaatgtattagttaatgaaaattaattaaaattaatgaaaaaagagaacataaatttaaaagagagcaaggaggggtatgggggaggactttggagggatgaatgagaagagggaaatggtgtaattatattatcatctcaaaaattttttcaatgagaccatgctgtattactattcagaaaaaggcttttttctttttcatttgaaaacaggcatatttccaaatatacagaaaatggcatcattctttcaacaactgtgtaagatttgtttacttatttattgcataagattttaaaaagtatgaaccttccaccaatttgttccaagtcttccttttgatagcaaggactttgttgttctgtgagaagaaggggtgttcctagcctcgctaaccttgttttgtgaggaaaagcaccttgttggtgtaagtgagtgttttctgattgtcatgacagcaagactgagctgggttttgtttcctggacattcacattgattgtgctttttcatgcttctactgtgttagccagtcttactgatgagtgggaataattcctctgaaattaggcatctctctcttgccttttaaactgatttttagattttttgtcaaatagtcaaattgttttaaggtttaatattaccaaaattatcaatcttttaaaaatgaattttagttttttagtaattactttggcttttgtttttcatttgtttttaaaattttcaatgtcagccaggtagtcttggtgcacacccttaatgccagaactctggaagcagaggtgggcagatcactgaattcaaggccacccagactacagagtgagttggaggacagctggagctacacagagaaaccctgtctcgaaaaacaaaacaaaatttcaatgtgtgtattctttgtagctggtaccatcttacacatgatatttttatgcaagtataaattgtatgttgagcactttcccccatgatttccctcgtgtctctcccatagcctctatcccctccttcccccactatgaatttagcttctactttcattttatatagacatagattgtctatataaaatcatgtatgtatatataaaatctaggatccctgcatgagaaaaatatgataattgtctttctgacaattttatttcagacaactgtctttctgactggttttatttcatcataattttgttcttcctcttgactgaaaacaacacactatatttctctatcacttcctctgttgttgatgtaacaaatgtgaacagtgctgcagtaaacattgatgggtaagtatctgtgatatgttgtcttggagtccttctagaaatgctcaataatggtgtagtggggccatatgacagacctcgtattacctcttcagatgcctccatactgagttctatagatcctggactaatgatgttcccaccagcaatgcctaagttcccctttaaaagcccatactcaccagcatttgttttcttattgattgtctttctgggagggaagagatggagtcttaatgctgttgtaatttgtatttctctggtgactcatgaggttgagaattttttcatgtttattggctagtagtacttcatcttttgagaaccagccaatcattgagtgggttgtttgacttcttgtttagtattttgagtttcttgtatattctaggcgttaatcctctatcagatgtgcacatggtaaagatcttctatttcagaggctgtctcttcactctgctttcctgtgtagtgtagaagctatttaactcgtgaattcctatttgtcaagtgtgggcactacttcctgagcagctggagttctactcaagacatttgactgtgcctgtatcatgaagattttttttcctaatttttcctctagcagttttggagtttggggttcttacataaagatcattggttgatccatttcaaactgacattttgtgagaaatacagatctggtttcatttttctacagttggatacccagtgtttccatcaccatatgttgaagatggtgtctttgccattattctttttgctcagcattgatttgactacttgggatcttttgggttccaatagaaattttaagatttttttttttagtaaataatgatattggaattgtgacgaaaattgtatagaatctgtagattgattttcagaaagagaccattttcacagtttcagttccaatctagaagtgttgtggtccttccatcttctagtgtcttctgcacaattttccttcagtgtttccaagttttcattttaaaaactgtctacttccttggttaggtttattctggggtaatttttgaagcagatataagtgggattgtttccctaattccacccacccacccacagaaggtttcttcactgggtatgttaattttgtaaccctcagctttcttaaagttgcttatcagatataatttttctgttggagatattacatatagaaccttatcttaaaaatactttgacttcttatttttctaatcatatcccttttatctcatcttactgttctagctaagacttcaagctctattgaataagaatggggaaaggagacacctttgtctgttcctttttgtagtagagatgtttgaggttttcccccatgaagtatgattttggctataggtttgtcatagcttttattgtaatatgttccttttttcatagtcttcagggtttttatcataaaggatgctgggctttaccagatatggagacaatcatgtgatttctgttgagtgcatttatgtgctatattacatttatgtcacgtatgttggaacatctctgcacctctggaatgaagtcatgagagtggtctgtttgatgtgttctttaattatgtttacaattattattgagaatgttttcatctatcttcatcataaagactggtctataatttttactttttatggtatctttatttggtttgtgtaatgttccttccttctctgttttgtgcaacagtttgagaagcattggtgctagttctttaaaggtcagtggaattcagcagtgaatccatctgggcctggacatctttttatttatatatttatttgagacagggtctctctgtgttatcttggctgtaactcactatgtagactaagcaggcctcagactcacagagatcctcaggcctcctcctcctgagtgctgggattaaaggtgtgcaccaccataccaggctggatatcttgttaatttgggagatttattatcatcattgtcatcatcattattattcttcaatcatgttcttcatgttaaactttttaccttatttactgcatcttggtttaattttagtaagtcatatgcatttgtaaacacagccacttctttttaaggttagcatatgaaaatatgaacattcttacaatactaacttcattgtgtcccataggttttagaattgtgttgttgttttcattcagttctaggaattttaaagttccttcttgatctcatcaatgatctatttatcctgcaatagtttgtagtattcactctatgagtgaacttgtgtgggggtgtgtgtgtgtgtatctgtctgtctgtgcatgaatacaggtgggtatgtgctgcagtgtgtgtgggagtggggtggcagagaacagctctcaggaactggtactttcttatccccttgtgtgatccagaaatgaaactgcggttgtcagaccagtgtgtaagtaacccgtggaccatcttgccagccctccatgagtctttgtgtgttctgtattttctcctaaatttctggttatctaccattgtggttaatttaatttttgttttatgtgcattagtatttttccatgggtgtcaagtcccctggaactggagttacagatagttatgagctgccatgcacggtcttcctttaaaagttccaacctcctcctacttctctctctggtgaccgaccatggtggtcagccattaactctgtctctcttctattactatctgtccttctctgttcttctatttctctcttgctagctctctcgtgatattataaactattgttaatgtatctctatagtctcatgtctcatcttgcgccctctttctttctaatttaagcaaaagagtaacaccatctgccctaaaaagttagtgaacccaggtaaaggtgagacagaagtagtgtcgtgggtaggtattggggttgtctttctgtgtatatgtttctcttattggttgatgaataaaacactgtgtggctagtggccagtccggaaggagataggtggggctaccagaggaggagaattctgtgatgtgtaggtagacaggagtcatcatgtagagcccaggaagagagaatgtggagggcattctctggtaagataaaaccacatggaaatacttagattaatagaaatggcttaataattaagacagagctagccaataagaagacctagccactggtcaacagttttataactaatatagcacctgtgctcatttggggctcaagtgccatgggatcaggccgggccaagaatcactcattacaggtaggagtttgtctgctcacaataaatcgcagtgttgaggggctcacttgaattgcaagagtgctgctgactctggtttgggatagtattactgggctggggcagacatccctaaggaggcaggcttcaaggagcattctgcaaaagaagcttgcatgtcctttacagtcagctgagcattctgaacatagtgctcacaaggaaggttgaagactgagcaatctccttctagttctgaggccagcagtgagagcacacaggctcaaaaatctcatctgtggaactcggggagagcctgaagccaggggaagcacaaggcaagatgtgttttggacagcagagcaaaacaactaccataaaaccaaagtgttaggctctgccaagtcctacagctgttccagaagcctccatagtgaacagcgcaggaacacggtttgttatagaaaacactgctgtggcacaattgctgagtgtccctcacttaccctcatatacatccacagatgtccttgtgtcttcagtttcagatggacaaaaggcaccgagtatataactcataaagactatataggatttgcctttctgttttgtttattcactgagacaagtacaactgctgcgtagagattcagatacttcggtatgggttgagtgcttttctgtgttcatgagtgcctggggcctgactattgtgggaggcctatccgcattcatttctactaggaagtagcagaaggaaggcaatctcctgctgtctccccctctaccatcacagaagggatgcagtattttaagggacatgagtgttacgccaggttcgcggagcccagagactaacccaaggagtcgacactgatgcaaaagcaaaaggtttcttttgaattcaagctggccagctaggatctcactgcatggcgggcaaatgagatcccacccagccaaaaagagaagcttttaaagggggcagaccataaggttgaaggccaccaattacagagtttccatggttacttaaggtcatacaaaatacagagttagtcagtaactacattttaagggagatacatttgactgagataagacagggcatgggcttgcagggttacagagtcacagggtctgtcgattatcccctgggctggggaatctttacaaccagcagggcacctttacaaccagcaattagcaaaaggatgctaacaggagtgatggatagtcacctctgcttctctgggagcagggctcaggctccagccatggtattcccagccattagaagcctcccttttttttctttttagagcccaagttttttaaacttttattaatttgagtttttggtccctcaatgagtgaagacaggaacgggcatagctgcatattctgcggtagggacctcaggcatgcttggtgccctcccactcagcagagcttctctgatgttaggaaatagcaatctggaagtaccccttccagtcctcagtagtgtgttacaaacccatccagggttctgaggtctaagtagaagagatgagggaagtgaaatccaggcaataagaaaagcccaatttagaaaacagctgctgcagaaatgggcacagaccctaaacaaggaatgagtttaacttgagctacaggggctgtcgagatgggtaaaggggcttgccaccaagcctgacaacctgagtgcattcccagaaactcttcatgtgcaccaaggcatgttcacatgcatgtacgcatgtgcaccacgcacacacacacaagtaagtaaacaaacagatgcaaaataatgtttttaaagaatcgaggcatggggaaatcaggtaaaggatgtgttacatataatttttgagtattgagctatttgctcttcttttaaattttgtatttcctagtatgctaaagaaaccagtggctctggcatggctgccatttctgagtatttccgcagtgctctcacccgcatgatgattaaaataaatgtacccttaaacaataacatttcattcagctggggtctggaagcacagggtggggaagggagagtgttgtgcccagactgaggatccccaaaagaacctgccaacaaggagacaactcaccgaatgcaaggacaaaggtttctttattgactggaggatacgagctgcagcaaggatcccattcgttcgggaacaaatgtagtacccactttcaactgaggggtgtttttataagggagggactgtaaggctggaagccccaagattacaaaacttctgtggttacacaggacaggacaatggttgtatgcttcaggcaaggtgcaattaagcaggatgctgcagaggaaatgagtttgttaattatctcctgggctggggacttctacaattgctcactatctgatcccctttggactagaggaatgccaacactgcacaagggtgcaatatctggtctaatgccttgagtcctgtggacctttgtttaaccttgtctgctgggctgccttttgagaacttagagaagcttaagagtttttctatgtgggctttggagtctgagttttagacttttattaatttttccctttcaggagcactgagagagggaaatggattagaatgatgtggatgaaaaagacataatagtaactttaaaattaaaaagggctggagagatggcccagcaattaagagtacttgctgctatatcagaggtcccagggttcaatttccagcatccacatgaagggaccagctccccattttggcagccataacaaccgaacacgtgcttgtctgaccttgccttagtcactaggaggtcagatgcctgtcttgtggcaaggaaccaatcagaagttagctggtggtgctatgctgtatggctctgggtgtgctttacagacaagtgcacagcaatgacgtgcagagcatagcaaccaccctgggagggcctatgggccataacaaccagttgaccaatcaatacagggcaaaccctccaagcctggaggcacaccaatcctgagcctgtgcgtacccctagacactccccttacgctgccctataggatctctatgcagacgcttcgagctgtctttttagccttccaccatggcgggtggatgaacggcccgagctaacatggggttagctcattaaaccactataataaagcctcatgcagtttgcatcaagctttcgactccacctggtgattggggtgactgaggtcctgggctgagatcctggaggcttgagatgccgggggtcttacacacatggcagggaacaactgttgataactccagatctgattcactcttctggtctctgcaggcactacatccatgttgtgcacagacatacatgcaagcaaaatacctatacaacataaaattaaaacaaagtttaaaattggctttaaactaatttttagaagtctttaaaaagtaaaagtttccagtcatgaagaacttgaaccctatcacaaaaaactccatgtgaacttgtaaccaaaattgatattatcatgcatctctcagctgttgatggggtttccatggacaagggtttgtcagtctctctcctcaccaatagcagcctggtaatcacagtggttgatctctgagacccagcctcatggagagcgataaatctctacacatgccaggcacagataaacataattaaattgacatcaccatctcaccttgggtaatctgttctaggtaaatacagatgctagctgtgaagtatatctaagcaaagtagctcttgcctataatatcagcaatctggacgattacaagtatgagaccagcccaggctctatagtgagacccatctcaggggggaaagtgggctgaagttatagtttggtggctaaagcaattgagtaaacataaggaactgagttcaaatccttagaatccaagtgaaaaagacagacaaagtggtgtatgcatcttcactcccagtgtgcctatggggaaatgggaggcagaaacaagggccaaaaatattctgtgtaacccctgacagaaaatactcccacttggacaggatgttgatatcaaaactaccagcatcaagagaacacacattctcccttgtgttctgattattttacatgtcctgtatttttatttatctattgctgtgcacatgaggcttagctatagcttcaggggaaagggaacttgagtctaagaccctaaaatgcatgtgggctccaccctgactttaactggcagagcatcacaaatgcttaaggaatgcacaggtggagagggaagagggaagggcctggattaatccaatgtggcattgctaactgacaatcacactgactgcccttttttgtgacagagcctgacagtgccacatcatttagctgcaacgctactgaggtgctttagatgagaaacaatcaaggttcttgtggcaactgacagaaagaagtaacagaaaatcaacacaaaacatcatgttgtatgaggaatctgcagagccacatgtagagagcacataacaaggaccaaaatctagaaccactgatcttctaaagtccccaaggcctcaactactgcacagaaaacccttgtactatcctaatgatagaaaaccctttgagcttagaccaagctaaagaaaatgtcaccctctgtttctggactggaaggtcctttaccaggataccaccatcctcattgatttatcatgcttgtgtcttaattaggtttctattgctgtgaagagacaccatgaccatggcaacccttataaaggaaaatgtttaattggagtggcttgcttacagttctaaggttcagttcattatcatggtggggagcatggaagcacgcaggcagacatggtactggccaagtagctgagagtgctgtatcttgcaggcaacaggaagtggtctgagacactgggtggaatcttgagcatatatgagacctcaaagctcacctccacagtgacacacttccttcaacaagaccacatctactccatcaaggccattcttcctaatagtgccataccctttggggccattttcttataaggcaccacatcttggttcctcatttttaaaaaaaaaaaaacatttatttatttatttattatttgtttgtgtgcatgtgcatgcatgatcatgctacagcaatgcatgtggaaatcagagcacaacttgtggaagttagttctcttcttccatcttgtgagtaccaaggatcaaacttagatcattacactttgtgggcaaacgcctttacttgcttaaccatctggttggccctttgatctctaattcttgatgttattagttactaagtgaaagtctatcacaggaggacctgcttgctgtgctgccgggtcatgtgtctatgccctcactctgaggaaaaacagagttggctgttgtgttagaagtgattgccccacctggaagatgctaaaatttttcattctcattttcttttactttactttagtttatttatttatttattttggagacagagtcttggaatatagccaagacaatccttgaacttgctattttcctgcctcttccgctcaagtgcttgtatttcaggtatacaccactttaccttgtatagacagggcttttaactttgtttttatttatttgttaaacacaggaagtgtgagcatgcttcatacttaccggaagagtctgtatagaggaaatgactggtgtacattgacagggttagcagttggaagggggtaaagttttatccttgtgctattacagcaagatactcccagaaaaatctagcagagagacctaactagggctacctgcacctccctatgtaagcaacacacttagcacactggtaaaatagaacagcttatgccctggtcaacttccatacaggccttcatggaagagaagaaagagatgtggtctttcgctatctttggactattgaaatttggaggaagatagtgggcaagttgttaaactgtgctctataagatgctcataggcatccatccttagtctatacctacttgatggccatagggcaccaacgtctcctatctggggcaacaaaacctttctctaggcattgataagtgtttcttaggggacaaaaatcaccctgggtaagaactactagaaacagaacagctggcctgtctctggaaggaggctcagctttgttctgaggcagggagcaagggacattccttatgtagaggcagactttcagaggcagcatccatccacatgtgaaacccaacaaaaccacccagagcatgtcagggactcttacccctatgcttagcaaccttatcctctcaggtaagtagacaccacaattgtttcttacatttccagttttgattgcctgagatgtcaaagaaggagagaagaccactgacaggcttctttcccactcttaaggaggctcttgggacagaaaaatgaaggctgtcccagacaagttaggacaagctgatgaccccttcagagcccaacaatattctaatgcagtcgggcttcccccagacttgcagaaattcccccaatattaatcacttcattgcttatccctcagaaccctcctagaatctgtttcatttagttattattgtccccaaaaggctctgaagtgagtcacaacagacattaaattagttcaaggttatgggttatttcaagcaggaaatatgtcttctattttcttttctatagttttatttttattgacatataaattctatgaatttatggagcacagtgtgatgttttattatgtagatacccttgcataaagtaatgagattcagaccgtctctctggagtttgtaccataaacctaaagaggagagaaaagattccccaaacttgacaaacataaattttcctctaattcactaaggagaaattaatgtccctgaacaatatgcctctccttcattgaaattaaagtctgaaatagattacagtcccatgtccttgccatcctcatttcctattttgctcacttttcagccacccttgcttcattctcaaggaggctcagttctccttttctgcagctgtggtctggaacatcttccagtaggatgggtggagtggccacaaacacttctaaaattggactaattcaaacccactcgtctgatgttttgaagttgctaaggtcagcaggacgtggcagagcttcggtggattgggctatacacacacatgaccgtttgcttctggtttctctggatcccagcagatggtacaatccacactgcttcactgttgttagtcaaagagcctagcagaaacacttttcttggaaaggtgggtagacaaggcaaatgggacagagacatgctttgtattctacattgctttctattgctgtgataaacaccatgaccaaagcaactaggggaggaagggtttattccatcttacacttccatgtcacgctccatctcactgagggaggtcagggcaggagctcagggcaggaactgaagcagagttcacagaggagctctgcttactggcttgctcagctttctctcttaaattgctcaggatcacttgcctaggaatgacatcactcccagtgggctggaccctccgacatcaatcacccaacaagaaaatgatccacagacttgcctaaaggccaatctgaagaaggtactttctcaactgaggtcccctcttcctagattactcttgcttgtgtcaagtagacaaaaaccaatcaacacaacgtatttcaccttctaggtgtactgactataagaaacgcacctgtggtggcacacagctttaatctcaggactcgggaggcagaggcaggcagatctctgtgatttcaaggccagcctggtctacagagcaagttgcagaacagccagaactgttacacagagaaaccatgtcttaaaaaaccaaaattaaaaaaaaaaatgaaagaaacgtactgttctgggaaatggtcaaaatcctgtaatgtgaactcttcctaccagcctggtcccatagccatgtcaaccccaaatgaacacacaagacttatactaattataaagctattggccattggctaaggtttcttatttgctagctcagtcataatttttcacccattttctaattatccatgtatttccacatggtcttatctaaccggagaaaggtccagggacctcttactcctttggcgtcctacatcttgattgtttagcgtttcgacagtaaagagagatggagagcgatttctcatttgtttctgcttatattctgattctacccagctatgtcacttcctgcctggccaatcagccaatcagtgttttagtctttaaccaataagagaaacatatacacagaatggtatctcccatcaaaatcccttcaagggcttctagtaaacccatgtcctggacacacagtgtggcacaaccttctaagttttcttttagctcttgatcttcagttgttttctttttctttgtagcagtctagcaaccaagggtttccatgtctgtttagtggtcattgttaagatcagatcaccctctatggcaaaccttgaaccccagcccctccaactgaggtcataagctaggctcacttctgtgacttgagttcctgcagaatcatgaagcccctggtggtggggaccaagctgttgagggttggtgtcaatgaattagaggatctaggcacaagccacaccgatccaaggctgagttgcttagttatcttcttgcatccactccaaaattataagaagaaatatttggagtaatcaagtgctaagaatttatcttatttatttacttattattttacacaggatcccactctgtaaacttggctgtcctgaaactcaatattaggccaaggtggccttgaactcacagagattgcctgcccctgcctctgcctctgcctctgcctctgcctctgcctctgcctctgcctctgcctctgcctctgcctctgcctctgcctctgcctctgcctcccaagtgctagggaatgtaccagaacaccgggctcaagtactaagaattcaaattctgaatgtcaatgagtatgctctagaccctagaaacaaaatgacttttcctgcctaaaatactggtctaaagttatgcctgggtctcacaagaaggtggaaacaagatcaatgagaacttgtaaaaattactcccacatgtatatggaagctcttattctttgagatgagtgttgtctgacccaaagttgttacaatgccaagaacctcagtctcatctttatagtattcttgatcccaaggaccaattacatgtaaacatctctggtagcccacatttagtcaacacaagactttttggggaaagagtctgagcaaatactgaaggatttccaaatacttccaaatactgaacgatccttctctgatgctcacctctcctctctgtgaaactttagattaagtaggtacaagaaacaataacaaaataaaatataaagtaaccctttaatagtagcaagaatcacgtacagctataaaactacacccatgtattatgctggtctaaaggcatgacagtagacttcagggattttaaaagattcataaaagagaggacagccagatgtggtgatgctcatcttgaatcccagcactcgggaagcagaggcatgtcaatttctgtgagtttgaggtcagcctggtctacatgagaaagtgccagtccagcctgggctgtatagtgggattctgtctcaaagaaaggaaatgaaagggaggggaggggacaggagaagaggggagggggaagaaggaggggggaggcagggagaggaaggggaaaaagaaggggagaggaaggtaggggaaggggaaaaggagggtagaggaagggaggggaaggagagagaaaggaaaggaagggaggaggggggtttgtgtaacagcaggtgctttttacacaagcctggcaacctgagccagatgccagaacccacagaaaggtgcaagaagagcaacaaggaaatgatacacaaacacacgacacaccagtaatagtaacaatattaaaaagagaagaaccctgaaaggagacctgaattttgttagaaacttgtgacactgcaggtatatgccccatttttatagcagatgtactgactgatgataactgatgaatagattataaaaatgtatacataaaaaagagaagcaccatataagtaaaatttgctaacactgacctaaaatagtatatttttttctgtgtaaacgtagaaggttttgagcgaaatgctgggacatcttggtctgtggagagaggttacagattctgaacaattttattctactatcactctatgaaaggtagattgcttagtgccttactataaaaatttgggatcctcaaatatatctggcctaaaagattttagatgggaagctcttgttctgagaaataataattttgtagttatagcaagaaaaatttctatcatagtatgtaagtgctgtgttacagaaaatattaaaatctgattataaaattaaactcttaaactgaataacagttattcctctaatgtgggaaattaccaatatggagcctggaaaaaatacaagggaatttaatagggaaaaactttacttacagagccacctagccagccggcggggcagcagtaagtacagcaagctggagatgaaaatgaaagaagggaccagccacgtgagcatccctcactcttaaaccttcctaagtcaccctgaccacgaggcacacctggagccagcccctaagcaggtgtggctacagcatcccctacattcctcccctaacaaatagacacaaagaaacacacacacacacacacacacacacacacacacacacacacacacacatactccctataatgctatcttttgggaaagatcactagatcacaacttctcatagtatgacctgaagaccaccagaaccagctctgaaatcctgaaacagatctgggaccacgtggaaactttctaaatatgtatctgtgattgtaggctggaggctgaggttcgtcctcctcaggactctggaagttctttgtgtatatctctcttacatcatgtaccactctctgccttgtgttttaaggacacatgtgcttcctacatacactgacaaagaataaatattattactccaaaagtgaggaacaatcagacagcaaaaaaatgatagcagggcattggggcgattcccaaaccactcagctccatgtctggcatctgggggtcatgacggaatcaggctttgggtagttctttcctcttctctgttgtttacagcctgtatgttctccgtcttgagctggttcaactttgcttcaaaggtcctaacatcccccatgatcctcagttcaacacacatcaggtttcaccttcctagcttcatacagtggcctttcaggttctacttgtgggaactctgatcctgtcacccactggtttgtctcattggctttctggaacctcaacataaccgatatatgacctccacagttttcagatttttcatctacaaaaccatctagatgaacttgccaaattttataaacagctttacttgtagcctacctgcctttggataaaaattacaggggcctctgtgtaaagtatcagaagaaacattgtttctgggcaggaaaccctatcagcattattctcaggtcaggttctcttccttcaaaagaatttccgtgagctttctatgggtggggtcttgccattggggcacctttctcgttgttgcaatcacagtgtgaagtttctttttaattgtacccatagttttaaaaagtacagattcttgggctggagagatggctcagaggttgggagcactgactgctctcctagaggtcctgagttcagttcccagcaaccacatggtggtgcacaacaatgtgtaatgagatctggtgccttcttctggtatgtaaatataaatggaagcagaatgttgtacacaggagtccagtttgttatagagtactcgatctctgaagtctcatgagtcaggccttcactgtccacatttctttaagcattctatttttctaaaccccttccattaaattctggttacagcattctatggtttctgtagcctaaggctgcaaaatcttattttcccttcaaaccagccctaaagacttaaagaccacgtggtcatgtttattacaacaatggtcccatttacaggatcacttttctgtcattacttttcttgttcctatgataaaatacttgacaacagcaacttaagaaggaaggctttggctcacagattgagggtatagatcttcacagcagtaaagtcatggctgcagaacatgaggcatctggtcacattatgctcacaatcaggaagcagagacatgtgaacaccacacttcagctcgctttcccctttttaattcagcccacagtcccaatccactagaagatgctatagacattcagtgtgtatcttccctttctggaaacactcttaattctggaaacccaccagtgtgttcccatggggattccaaatcaagtcaagtttataattaagaataaccatcatagagcatatctcctctctgttgtaggagttgaaggctgagtctctccttcaatagtctgtgttgttttaacatattgatttttgtagaaatgtatactcatacatgcaactctgcttatgcttcctcacattataatctgatacaatcccaagggaactaatttgtccaaaggactcctattcaaataattactttttaaaaatttgtttattttgtgtgtatgagtgttttgcctgtatgtatgtttgtgtaccacatacattcctgatacccataagaggaaagaagatgacactgacttcactggaactggaattacaaatggttgtgagccaccatgtgcatgccgggaatcgaacccaggtcctctgcaagaacaagtgctcttaaccagtaagccatctctccaggcctgcaaagaatgattttaatcactgtttgaaaatgaaaagattgtgtaatttcttgttttaaaacaaaaaccacttgtggaaatactcctttactgtgatacttggttaaaattggaattgttgaggttgcagagatagcttattcatgaaagtgcctgcgatgcaagcatgagggcctgaatttagcacccacaaaaaagccaggtgtgatgttgctcacctgtaaccctagtactgggggtagaagttgtcatagagaagggaagatctcagagcttctagcagctactctagccagctggggactgtgggttcagggagagaacccaactcaaaataacaagtggaatgtgaaagaggaagacccagtgtcctccttctgtcctgcagacttgtgtataaaacatgtacacgtacatccatcgcacggatatcacacacatcaccaccccatacacaaattttttaaaattgtaggttttttttgtttgtttgttttgagacagggtttctctgtgtagctttggcactatctatgttctatctatctatgttctcctggcacttgctctggagaacaggctggcctcgaactcacagaaatccacctgcctctgcctcccgagtgctgggattaaaggcgtgcgccaccaacgcccggcttaaaattgtagttttttttaatttaaatacaactaaaacattgttacaacaaaagtaagtaacatataatatctataaaggagggatatatatatatatatatatatatatatatcaagacacttatcatttaaaattaaccagtaaaaatataaataaacaggaagagaagacttctctaccaagcaatcctaatgtcttagctatgttggtatcttgctttctggggctaatgccaaccacacaggattgttgttacatcctcctcacagatcccagatccaagaaaacatgatggaaatgcaaatgtaaagaactatttagctacatagaatgacatacaagtctgcttttgcatcctttctgttgtctcttgatactttattgacaatatgactatgaaatgagctgattccatatcagactatgaagaatgtggattacacaggatttgttaaagtgtatgaggaaagcatagtttcccctgttattggttggtatattaaccctctccggtgctgacagacaattcctttcctgcttgtctggtagaaggctctgtgatgtctttctggcttgtgttcttctgagaaaagagtccatgagcagtgtcacagcacattccccggtaaaaatagcctgagaatgtttatgattaggccttctggaaaagacgacttccatttttatccttgacatttattcctaagatatcaatatggaggtggtagcccatcagccatattggggctgttctcactattgattttggacctttgaacagcaaatgctttcaaaagtcacattccaagacctggggatatagctcggtggcaccatgcttgcttagcatgtataaggctgtgtgttcaaatgctaacactgtgaacagaataaaagggcatccacgcttgtgggctgggagcatgagcataggataggaagcactatgccttcctcactattcctgacatgatgttgaggagaggccacattagggtgacagagcgcagagaggaaaagtcttgtgggagcaattctgagattcactaatgtgccttgtcattggttctaaaatagaagcagcaggaatcattctggggccctctctggaagcaaataattaatccctgagaaaggaaattcaaatgtgcctcctatagaaagcactttagcatatgtaacccacaattttagattaaaaatgccctgagaacaaagggaataaagtatagaattaaaaaaatccaagctacagtaatgtaaattttcccattttcctttgcttgctttctacttcccatacccacaattacttctccactcacaagcctcacaaatcaaaataacatggaaggaaaccctattcttgtttgtaaataaataaaacacctagggtgataaaaataccaataatctggaaattcagttataaaactaccagaataatgtttatagtatgttctgctttactaataaagatctagcagctgttctacaaagccataaactctacagtaaattatatcctagctatcttcagcactgtatttgctgtcaacacatgactttcctacccttatcctggacacaattctcccaccattactatgaagtttattgtgtcaggctccctgagaagggggaacattaagaaatttcctaactgtgctgtctagtgttttgtcaacctgacacaagctagagttatttgagggcaggaaatctcaactgagggaaaagtccctccaggtcagacaggaggcaagcctgtggggcattttcttgattgatgatcgatgtgggaggggccagtcactatgggtggttatcatcctctgagaggtggtcctagggaatataagagagcagactgagcaaaccatgaggaacaagccaataagcagcatttttccatggtctctgcttcagttcctgcctccaaggttccttctttgagtttttggtctgacgggagtattacctggaagtggaagataagtatcttttggtcaccatgttttatcacagcaatagcaagacagtgactatttttgtcactgtctagaatgactaaacatctgatggaactatgattatagcactctgtgtgggtgtaaccattcataagaagtgccttgagacttttcatgaaataaatccagagtcttctagtctcttgctcaaagtccagtgccgcccataggttgtttgttgtcccacctgcaggacatcaacctggggcaagagagtcagggatagggaatgggggcaagagacgcagaaaggacgaccacaagacaggattctgatcaagtccacaagacaggattctaatcaagtggcaaactttacttttctctcaggctagcttatatagtcggcagagcaggatatggggaggagtagaatgggttgtttgtgagccaggtgttagtgtaggcaggatattaggaagccacaaagaggatgtttggcagggtaaagagttcatgagtaagaggtccaggaagggttgcctaggtgactgagcctgtgggtggaggactgggtcaatttgtttcttttcttgagctgaggttctaaggagctgctatgtaaagtttaactatgcggcctgacaagcatggcctaggatctcatgccaagccctgagatttggctcccaacagtttctgaactaaaaaatctttgcatttatgacctgtgactgttaagagtgttggtgcctgcactggtctcacaagagttaactcttaccacacagaaatcattcttaggaaagttgggaactagggaagaggtgaggcccttctcttggggataaggatccaatttgcctccatcaatgactatccatcatgaatgctgtttgtagtcaaccctccaggactgactagtacatagattttctctcatgttaacaaacgattcccagtgggttctaaaaaaaaaaaaaaaaaaaagcatttagaataagttgacagcaggagcttggctctccaagtcacattttataataacctcaggaggttttgttttgtttgagacaggcatgcaccaccacatcatgctagcttttttttttttaatgtgtatgggtgttttacctgtatgtatgtgtactacatgcatgcctggtatccttggagacgagagagggcataggattccctgagactggagttacagatcgttgtgagccaccatgtgggtgctgagcatcaaacccaggtcttctggaagatggtttagtgccctcaaccaatgagccatttctccagctccctgaggagcattttttaaaaatgcaaatccagaatacagctcataccaaaaaaaaaactcaaactatttctagtgggaactaagaattatttcatttttatcactattatgaaaaaaaaacattaaacagataccccatctctttgacagaaactattttccactactaagtttctttgcaatgttatctttttgctatagctatgtatggattttgcagtttgtgaaatatctttatcccttgataaagaaatttgctttacatttttgacaatgtaagcaaaataatgagcataccgactggtttcctatgatcctgtggttgaggccaggaaccctgggaagagggaggcctggcccctaccttgaatgtgctaataaagagcacactacagtggtaaattaggatatagttttcaagggaatgcaatggatgctgtatacagagtggaagactatttgggtagctggtgagtggcagtttcggtggtgtcacaggcacatccctcagccttatgcctgatgtagaatcatcgctatgtgactggtacaaatattgcttatgtaatgggaagttccttgagagtgtttggactgagaaatgaagacgcaacacaaatttcaaaagaaacgtctaaaaaggatgacagcctacatccatcaaacagaaaatataaaggaaacagagtacacagggtaactgaaggagaaagtagattttggagatagacgttggcgtgtgggaagggagtagaacgtgattctagaatgaaggaatgatctgaaggaactcacatggagagtctaagatgtgtcatcctcagcttcagggactaaattagtatctgattcctacaagaagattcatatgcagagagacagatatgtttagatgctgacggatggggaggctgtgggcaaacgaagtgcatttcctgaggaccagattggtgccactcatgagagacagctagcctggaagcaacaggaatctttccaagagccatctggaagaggaacagaacttgggcagaaggaggcttgtgatgaattgctaggtgtttaggcattgcagaaggagctgtaaacggctagttaaaaaagacatccggttgcctatgtggaaaaaaatgaaaagagaaggatccacaggcaacaggaattctcatgagaacccactgagaaaagggtaactcaaggaagccattcactgatgataccaatcacgtaagaacttccatgcctttcatttcctctcctgtttcgccagtttcagccctgaagggcatgaaggtaacctcaactgagatgtggaagaaggtgtgtgccaggtggcacaagagagaagctggcaatgtcttgacatgatacaggggactaaaggaaccttccattaggacagaggaagaatgagagattgggggacagcaggacactgagttttcacagttaggtcatgtcttgtttactaagcacataggttacaaaaagagttttaatgtctgtactcaatcatttcatcatagagaagacacactgctgaatggctggagtccactgctatttttagtttacaccattttcccagtattactctgacactctagggttttctcaggcaaatctaaggaagaacgaagcctccactgttctatgactaaattttttccgcttgtgattttgtttttgttttgttttgcttttgagatagggtctttctaatgtagctttggctgttctggaactcactatgtagagtaggctggcctcaaactcatagatctacttgcctctgactcccaggtgctaagcccaaaattcttatctgtagaggaaaaatggtcccatgatctctcataccatcccatcttgttcattaagaagtctgtggaggtatcctgggggccagtagaggactgctgattgtatcatcaaatacatgaccgtggcacatgctgtaaagtggttatggctctaaacccaaagtgctcgtcaccgcatgctaatgccccccctatttctgcccagaagagtatggtctagtgggatgaccttcccctgtaaacatgtgagggttatggaaggttctgctccagccaccagggagttccgcacaacttcaacaacaccttactcgtgaaacagcctttctgtttctgaggcccagcctgtcaagtggaaatacttaacttcagccatggcattttgttttagagactcaaccagccttgtgcctctccaggcaatggtaagttttcttgtgaggggatgagtgagaaaggggcctgggtacttggagatggctatggctcactggtctttgggggctttggtgatttacatgaaaaaaacaaaaacaaaaaactggggcacttgctccctgtgagcactcaaaggactgagcaatgctctgattccctggacaaagtccagcactgctggcattctgggtgatttgcatatctgtgttcattactgtggcaggggagagggccacttgtctgtacacactgcacaatttttatagcattttctgagtgttcctaccgacttccacaaagttacactgacacacacagttacagcaaccaaaaatgtctccatgggctggggatgtgcttacctatctactgtgtgtaaagccctagattcaagtcacggtaattcaaaataaaaaaacgtcccaagacaaccaatgctctctgggaaaactgtccctcagttgagaatatccacttaatcgtggatataagtgtggaagttctaacttaataactgtcctagttaggtttcttttactgtgataaacaccaggaccaaaataaagttggggaggcaaagatttatttcatctcatagcttacagtcaatgaggggaggtcagggaaggaactacagacacaaacctgaagcaaaactaaagcacagccatggaggagtgctgctcactggtgtgctgtcaggacttgctcagcccactttcttaagtaacccaggatcatctgctcaggtctgacaccacccatggtggagtgggctgtagatgggagtttctgtttagcctggtcctagagccactttgccccaaataaacacacagagacttataattttttaactgtttggctgatggctcagacttcttactggctagctctctctaaattattaacctatttctattaaactatgcattgccacgaggctgtggcttacccataatccaagttactccttcagcagctccatggcatctcctctctcttcctcccacaccaatcattaatcaagaaacacccccatccacttggccaccagtcagtctgatggagacaattctctgacagaggttacatctttctagatggccctagcttgtgtgtgtcaaattgacaaaaaaactgacacacataataactatctaccaatgtttgattcttctgttttattttctatacatctaattttcaataatatatctcctgtttgtgtatgtgctatgtgcaattgttctctagccttttatgagtagatgggaatttaagatgagccctttggaaactctggaatttatgagtaagatgacagattagacattgctctgtaatgtggggaaggaagtcaggataggaaaaaatagattcagtaccaaagggaaaaagaaagaactttaaaaattcacaaaaagaggaaccaacaggtgaaaatcagaataggaaatgggcagcaggatgagaagaatcagcagctgagcatcccgctactggcttcccagctggacagcagaagggacacctcatctggaaggaagccaagtggaccaggctcaaacacagttccaggtctcgctaacagaaatgctcaacagtggaaaggaattattattattattattattattattattattattattttgtgtgtgtgtgtgttgtgtgtgtgtgtgtgtgtgtgtgtgtgtgtgtgtatgctgtgtaattgtttcctcagatattgaaacattccaccccacctggaagctctttaaacaggaaggtaaaaaactcaaaatagcctcaggaagtccctgaaactgagcagatccactaggcctctctctgccagctataaaagctgagagaccctctcagaggagccaagcagcaaagaagaccccgagatcagagcagcttcctggaagaagcataaaccagccaagctgctggaagaggtttggacaaactgagtcacctggaaaggacactctccaacctgttgaattgcctgcaggctctgcagtgtgctctagcaccccagctttgtgaactgtcacccatggtggggtgggctttagtgatgaagctgtcattgagtcatttctgctcctgtaagtaacccttcacccatattcctgtaagtaaccgcaataaaatgcattggtttactaagttggactttggtggtatctctattttggtctattgtgatctcccttatctggagtgaacagaggtatagaggagtgtgggtagaggtgtgtgtgtgtgtgtgtgtgtgtgtgtgtgtgtgtgtgtgtagtgtagtgtctcccagggaaaagttttatcatataacaacatgaatatgtgtgtgtgtgcatgtgtgtgtgattactcacgtttcacagtgtgattgtggaggtcataggaccatttacaggagttggttatctactattgtgtgaattcccaggatcaaactcagatgaccaggcttggcagtaagctcctttactcacaagcccagaattgcaattgttttcactctccagaggaaaccgaatgacgtggctaggtgtgatcttaagaaagaaacattttaaattgacttacaggggtggtggtggctgagaatagaaaaaattacactggcggctgaattcaagatgacagcaaaaggttccttcattatgaccaagctagcttcattccagatatacagggatggttcaacatacataaatcaataaattttacctatcacataaaagacccacagacagaaatttcgtgatcatctcaatagagatttgcctttgacaaaattcaatatccctccatgataaaagtcatggaaaggctacagatatggggagcatacctcaatttaacaagggctatatatgacaaacctatagccaacatcatactaaatggagaaaaactcaaaacattcctagtaagacaaggatgcgcactctctctactcctgttcaatacagtgcctaatgtcttagagcaacaatgcaagagaagaaactagagttacaaataggaaaagaagacaaaatatccctatttgctaatgatatgattgtatacatacaataaagaaagaatccaccaaaaaaaaaaccttttagagctaataaagactttcagcaaagttataggttacaaaataaccacacaaaattcagtagccttcatactaacaaagaaatcaaagaaacaatcccattcacaatagccaccaatgaaataaaatacttgggaataacccttaccaaggaaatgaaaaatctctacagtgagaattttaaggcactggagaaagaatgaagaagacattagaagatggaaagatgtcccatgctcatggattggaagaattaatcttgtgaaaaatggccatcctacacaaagcaatagattcaatgatatctcaatgaaaatcccagggccattcttcacaggcttaaaaaaaaaaatctcaaaatttatgtggcaggaccaaaagctaaggcttgtcagtacaatcttgaacaaaaataacactgtggcaggtatcaccctattttatttatttcagattataccacagactcatggtattaaacatacatggtaccaacccaaaaatagataggcaagtggacccagattagtccatataaatacaactacctgatttttgacaaagatgccaaaaatgtacattgaagaaaagatagcatcttcaagaaatggtgcttggaacctggatttcaacacgtgggactggaccctcttctgtaccccacacaaaattcaattgcaaatggataaaaaccctcaaataagacctgaaagtctggagttgctagaggataaatagggtgtaagcttcggctaataggcatagatatgtcttttcttaaggaagttaagaccaacaattgacaagtaagatctcatgaagtgaaaaagattttatgtggctggtaagatgaatcggtgcttaagagcagtggctgcttttccagaggacataggtttggttcccagcatctatgtggcaacttacagtcatctgttattctagttcctggggatctgatatttcttctgcctctgtgggcaccagacatagaagtcgtacaaatatacattcaggcaaaacagccatacacataaaaataaggcaataacaacaacagcaataataaaaactttcatacaggaaaggaaactcaagtgtaaaggtagccacagaatggggaaaaaaattctctgctggctatacgtttaatataatagtgtctagtatatagaaagaactcaaaaattaaaaataagaaaaataaataagccattaagaagtgggctatggaatggaacagaaagttctcaaaatcagaatacaatggaggccaggcagtggtggcgcacacctttaattccagcatgggaggcagaggcaggccgatctctgagttgttggaatctgtagataccccactatggacatgtagactactaggtaatactgtgtattacctaggtcataactgcaataagattactttttcattgtgtgttgggaattcacatttaagtgagtgcccagtatttttatttacatcatttgttcattctattgggaattgggggtagaagacactccagttttagatttattttctgtaagtctttggcacatgatacacagatgtttgataactacaatgctaaagaaatttttttgggggggtgtttgagacagggtttctctgtgtagctttggagcctatgccggcactctctctgtgtagaccaggctggcctcaaactcacagacgtccacctgtctctgagccatcaatgcccggccactaaagacattttgttataattaaaattaacactataccaccaccagtcacttttcaagggttttttgttgctggttttttgtttgtttcagttcctggaacaaattcactttacagtacaaatctacctattttgcagggtacagtggccagcaaaaacaactttttgttctgagcatttactctagccttgctgtctaatgctgctgtctcctagggcgctcaaaccaggaagtctggtttaaaagctgctaatgaaggccctaggcagtggtttcctttgtttttgaagggtgaacaggccttggaaaaggaacactgacacctagcggcagaatcaagtattctcccaggctggaggcaaagacaggatcaagttaaatcaagtggaagatatgaaaacgccggttttggttgcttccacttagcattcagtctgttaactttagcaagatacagggaggaacagttacttaccagtaaagctgtaacattcattttcataaaaacagcagggggagagtgggcagaaagatggctccacaggtaaaggcacttgccacagacacacaccagggatagtgagagtaataaagtacagcaatatgaaaaagtcattcccttcagcagacactgcaactacaagaaaccaagcaggatttgaaagaaaattctttcaactagaacccatgaggacaaaattcgtgtttactttaaaatccatacggtgcctgaatttctgatgcatgcacaagtctcagtaaaagctaccagcaaagaggactcagaagcttggctcccggggttcaactaagtgttccctaatgcagaaaatcctgcagacttcaaacagacccacaaaaagattcagctgcttggtcacatgtgcacttcagtactggggatatatttttgcatcagagagaaatatttagttacaaatttaaacatttggtgttgactcttttttctttgccttttgtttgttttctacggggtttgtggctagttaataaaaggaaattcatgtcaacttgtcaactccgtaatcactcttggccacgtgccacctgtttcaatacatatgtccttctgagctgtggcaacaaggcttctgttacctttataaatatttactgtctcttactagatacaaaggaatggagactccagagcagcgtggttgtacagttggttgctgagcaggaatatgttttgcaaattccacttctaccagtgaacagtaagatgattttctataggaaaaacaaaacaaaaccagttttgaactttctatcaatctaaagagtcgccaggtacttgctgagctcctccagtggccagacactgagctttacacacttatgtaaactgtctggcattattggcatgattttaatccatccatgcagttctatagtctgtctgccctgttaagggtggcactctgtctactaccataaatgagtggtttgtcagtctatggtgcttggaaggtgcctgacagatggcactgtgtgcctgtctaccctggcactgtcatcctctgtcctcaaaatggagtcaaagctgcttgtaaaatggaatctctcagggtgagacatggtctgaaaaacagctgctttacacaatttagggtgaacacagcctgatctcaacaaagcttgagattctggcattcctctctcccccaaacccaaagagtggttctcataaatctactccaaccctgtttgctgaacctttaaccctcttatgaattacacactttggacaacattagaaagaaggagaccggtttcttagcaacctttagagatgttaagctagaaagtcacaagaatatatacacccattgtaaagacacaagcacaattctctcataaagaagatcatgcttgcctcattggtgctctctctctctctctctctctctctctctctctctctctctctctctctctctctctcaaaatcccagctttgtttcacatttgcatagctctgaaattcatccctttgttgaggccacaaaccccagttttgctcccatggaggtctctgctgctggggtggggtggagctgtatcccacagctgacaactgactgttgatctctgtgcagatacagacttaggagcaaaataatgtaattacatatttttaattccctaagctttagggtggttgtatcaacagcatttcattactggaacactctttagcccccactgccttagtggagaaatctgaaaccctttgtagtagtgctatgtttcataatagcacagcctgggatctctcagtggtgtctttgactttccctgtcttctctctgaacagtgtaggaagcagattagctagatgactgtgtgttacctgcttcagcccagcttgagtaaagatgtaacccatactaaaaaaatcttagtgacttcctttgctagggagccatctctccaccctatggaagtccagtcaatcatccagaaaagtggtaacactggctgtgtgatctgagttaagttcttcaactctccaagcacttctgtctttaatatggacacagggtagctgaggtctggttggtccatgttctaagttactccatattgtaactccagtgctttttcaggctgtgcctggccttgagaaaccccattttttaaaatttaatttttatttaaattaaaaacaatcttattttacataccaataccagttccctctccctcctgccctcccattcttcccaccccccagcaaccccatcccatccccattacttcccagggagggtgaggtctcacatgaggggatcaccaaagtctgtcatatcatttggggcaggacagaggctctcccccatgtatctaggctgagagagtatccctccataaggaatgggctcccaaagtccatttgtgcactaggaataaatactggttccactgccagaggcccaggcctcccaactgacacccacgttcagggggcctggtttggtcctatgctggttccccagatgtcagactggggtccatgatctttttttgttttgttttgttttgttttttgttttttgagacagggtttctctgtattgctttggagcctgacttcaaactcacagagatccgactgcctctgcctcccgagtgctgggattaaaggagtgcaccaccaacgccggccccatcatggtcttgacccctttggagaaactccatttcacaggaagcttttgataccattttgaagataaaggaccatctctctgacataccatccatgcagaagactgatgaattatgtattcctgggagtagaaagggtgccatccttaaaatttgcttaggtgaaccaaaactacaggggtacatgggaactgtcctggtttgctttcaattgctgtgataaagaccatgctaaaagcaacttgggagggaagcatttatttggcttacatgccccaatcacagtccatcactgaagttggggtgggagctggtgcagggcaaactgaagcagaagagactatggaggaacatgaattattgccttgcttttcacagcttgctcagtttggttttttatacaactcaaaacctcctggctgagcatgacaatatcagcagtgggctgactacctccatcaatcattaatcaaagacaatgccccataggcttgcctacaggctaatctgctggaaccattttcttagacgagggtccctcttcccaggtgactctagtttatgtcaagttgatgagaaataaccggcatgggcatactaacatacctaacagggaaaccagacctgagaacttaccagagacactaggctgaggaaggtgtgcaacttcctcacctggaccccataaagagatgaacacctaacactgtgatggcaatgccctccgtgacctgtcttctgacatcagtgtctgtataaatgaccaactcccaactgtccttgaggcttcagctcaacttgatctggctgctgatgctgtctatccctgtgctcacccaggtggatctcaccctgctggtccagtgcgtttgcctctgcagttggactcaactcttcagcttcactctcaaagctgtgatccacagaattctgagagtagcagcttcttccaggtagcttgtctgggtttcttactctttcattatgggctctatttacatatttacctgtctatctctggaacctcttgaaactcaactgcaggccccttaaccttttgtatctattctgcagcacacacacacacacacacacacacacacacacacacagtgagagagagacagagacagagacagagagacacacagagagagatttacagtgtggtgtgtgatatgagttaataattaaagattagaataaaaagctcatgtccacctcaaccagatgactaagaaaagcaggattctggaaattttctgtgggttgcaccatgtctataaaacaatatgtccaagtccagctgctgctacttgttaaattaatcttatttaatgccccacaattgaagaatggataaaagaaaattattacacaatggagtactactgagtggtaagaaacaatgacatccaaaattcgaaggcaaatggacagaactagaacaatcctaagtgaggtaacccaaaaccagaaagacaaatatagtatgtactcactcataagtggataccagacataaagcaaaagatactcagcctacaattcacaaccccagagaagctagaatcttccagaaacagatggaagcagatgaggaaatccacaactaaccattttgctaaactcctggagtacaatcaaagtaagggaggagtgaaaatatgaacaaagcagtcaagaccatgatggagaagcccatggaaacagctgacccaagctagtgagagatcactgactcaggtctgacaaatgaggaacctgcataagaccgaactagactcccttaatacaagtgacaatggtgtgactgggacaatacatagggtcactggcagtgggtccaaaatctaacactaatgcacaaactgacttaatggagcccattctatctggagagataccttgtttagactagacacaggggtgtggagggtggagaggagccttggtcctgcctcaacgagatgatgggacaggcttagtagacttcctaggggaggccttaccctctccgtggagcagatgggatgagggggagtggagggagggggaggaggagggaggggaacttggattggaatgtaaaaaataaattaataaaaaataaaataaattaatcttatttagaaatcaggtctttgaagacacaatcaagttaagatgcatgtatcatttttctaggaaagttttgttttcaaatcaccattttgttgtttatatcactgaattttttttgtttttttttttgttttgttttgtttttgtttttgtttttcgagacagggtttctctgtgtagctttggagcctatcctggcactggctctggagactaggctggcctcgaactcagagatccaactgcctctgcctcccgagtgctgggattaaaggcgtgcgccaccaacacccggcatatcactgaaatttttaagtggtctatatcattgttgcaacaaaggctattaatccacatcttccaaatcagttacacaggtgcctgcaaccatgcctgttttgaagcaacttaggaattttgaaacttctaaaacttatggtatttcctccaacatatttcacttgtgtgaagtttttatgtgtgccatgaaatatcttccaaaactttcaatatgattaaaagttatctcctttcgtttcttctagtatatgcttaaagtatgtttttgtgactctgaaaggacaggactacaatggcagtgattgtgaatggcagtaattctcaggggaaattgcactcagtttggactgcacagaacagaggtaccagcctcggagagttcagattccagagacagtggcaaaacagatacctcatgggtgtttcttatgtgccctaattgaactgtttgcaagttcgtgatgaggagacatattttgttgtattcataggaaagtttttttttcccaccagagaaaaaggcagtatcgatggtgatcagaatgatgtgtatcctgatagacagacttggatgagaataaagatacagacactaggccatgggataaagcagcagcaacaacaacatcatcatcatcaacacatccaagttagtcctggaaaagtcctatgtcaaccttaagagtatcagcagatctcccccacaacatccctctacatcccacatctactgttagaaaagaaaacatttttggcaataagactatcaactttctagaaatgttgacatctctctgaagggatgcatggttgttgtgaagggcctagaacttcttgacttcggattcaatgtgaccgtgcctcaggctcccagaggttaccatggtcctagtggcagcacaggctacccagatcagtatggccctgacagcagcatggcccttggacaccaacatgatgttaggtggctgaccggaccctgggcatctgcaaagccctcagtggtaacatgtaccacagacaccaccccagactccagctgctgcaggacaatggatccagacatggccctaggcagtggtccaggcccagatatctccatggcttcaggtggcagcacaggcacaggccacctaagatcagttgcatggtcctcagacacccctggttatctgcacagctctaagtggtaacaggagccacagacatcaactcagaacctggctgctgtaaggctacagacctggacatggccctccaccacagccctagcctgatgaataccatggccctgagtaacaatgcatgcaactcagatctgcatggcctccgtggcagtacaacaatagccacaggctgcagcctagaccccaggcatatgagtggtctttggtggcaacatgggccatggacatcaatacagaccctggctgtagtaagatctggacctagacaacaggcctgtccatggtcctcagtagcgacaggcgccacagacatcaacacaggtcccctaggctgcttcaggatctcagactaagtaacctggtccaggcttggacatcactttggactcaagtggcaatctggccattcaagtcagcctgttcctcaccactttcatctcttccagttccccaccctgtactcactcaccataatggtgcccgatcaccagtgccagggctcctggttgcatcacaggtggtattgattgagtcctgcctgccccagctacaaggcatggcaaggagctgttgcttttcttatctcaagtgctcaggcctagaaaccatgggtggcctgcaccttctttattataacacacaggaccacctgtgtgctgggccctcccacatcaatcggtaattagaaaatgctgcacagacttgcctacaggtttatttaatggagggattttctcacaagttccctctttccagatgactctaaatggagtgaagttgacaaaacaaacaaaaaaataaaacaacaacaacaaaaaactaacaagcacatacaaagaagtgactttcactcacagaatatagagaagcatgtaggtgaacctacaggagattgagagaagtaaaatcactatgaagtaagccattgtcttagtttgagtcactattgcaatgatggaacaccatgaccaaaaagcaactttggggaaaaagggcttcttgggcttacatctctacatccctagtacatcactgaaggaagtcaggtcgagaactcaaacaggacacaacttgaacaggagctgatgcagaggccatggaggattgctgtttactggcttgcatgccacatggcttgtttggcctgccttctcacagaacctgggacaccagctcaggggcagcaccaccgacaaagggcttggcccttcacatcatcacaagttaagaaaagcttgccttttttgagggccttaccctgcctggggagtggaggggggatggctaggggcaggtgggatgttgggggggaggggagggagagggagaagggattaacatctgaagcaagcttgttcctaatttgaactaataaaataaaaaaataataaaaacaaaaaaaatgcttgaaaattaaaaaaaaaaaagaaagaaaagcttgcctacagtccaatcttacagaggcctttcaggttctgtcctctcaaatgaatctagcctgtgtaaagttgacctaaagctagtcagaacagccacaatctaaccaaagagaagaaagagtcaagaaagcttttaaagaaatcttgtcacacaaagccacagagaaaccctgccttgaaaaacaaaaacaaaaagcaagaaatcttgtcacactgaaaattagttagcttgtgaaaattaatttcaaattaaaatgttagattgttgattagttaagataaaccttaccgagctgtgtctactggtagccaccacagagtctggtaatttgcagagagctagcgtattcatcacttcccaatactaattctgtgcccagataggcatgactgagatgtggaccttgccttggaagggcttcagattaaggaggaagtacacctaaatagggttataattccatatgcaaagtgctgtgatacaagcatgcctgggagcagatcaggggacaataagtgagggggtgatattaagggaaaagctccccggcaatggtaccatcatccaaagctgggggataggggaatgaagttatcccactaaatagagcagtgtgtggataggcccagcaggaaggaaaggatactggaaacttccggtaatgctttgtatttagagaagatatacatggaggaatgcagcaagaactaaacaatgaagaactccaatgatgacagcatccaaccgccaagctaaagaacacagagcttatctgaggacaatgagggatctctggttttcccgtgaggatgggcaagcgagaagagaagagacactgagaagggactggcacagtctaaaatattaacctcaagaagaagaaggagagggagctgatggggcaggtccttctgtgtatatatttgtcttactggttgataaataaagtactattggtcaatagggaagcaagttaggcaggactaggagttgaggaggattctgggaaatgtagtaaacagaagtcttgtgatccaggcaggaagtgacatagcaggcagacttagaatataagcagggacaagcaggaaatcatgctctttctcctcctgtcttctctgtggagccgccatgtgatcccaacaagagaagatgcctgccgctgtcgtccaataagttcttataaaacatatagattactagttatggttgataattaagattgagctagcatataagaaatgctagttgctgggcgttggtggcgcatgcctttaatcccagcactcgggaggcagaggcaggcagatctctgtgagttcgaggccagcctggtctacaagagctagttccaggacagccacagagaaaccctgtctcgaaaaaacaaaaaaaaaaaaggccagcaacattgtaactagtataagtctctgtgtggccacagggttagggtggcttgacagaatcgttacagggagccttaagataaggatggacagctgcactaggaaaacgagacaaatttgttactataaatctttccaccaaaagccgcctgagccccactgccacgtgtgagctttacgccagccaccctaggtctccgccagcagcctctgcccacggcatagatggacaaaataatacagagacattagatacaaagctgcttggccaatgactaggattctcatctgttagctcagtcttcattatcataaatctatatattttataagacttatcttatcggacctcttattggcgtccttccttgctggtggctcacatcctgctgctggaggatgtgaatgggaaaagaagctacttcctgtttcctcgcttatatatgagtctccttgctatgtcacttcctgcctggatcaccacttatctactacatttcccagaatcctctttgactcctagtcccgtctaacttgctgtctcattggccaaacagtattttatttaacaatcaataagataaacatacacagtacattccccatcacaatttattgtatgctcatgaaagacccccgaagaggtactttcgtagagggagacccacacccaggaatcagcgaggccacgaacttggatgcaaaaacaagaggctttattggagacgcgggtacccggggcgacttagcttctgtgtggctaagcgccctgagccaagggaaaggggtccttatatagggaaaaaggcgcaagctaggagcagggattctattggataattctaatgaggcattgtacagagctattcccattggtcaatgtatatgaggcgctatacagggttattcaaatgaggcaaagtacagagttattcaaatgaggtgaaacatagagtctttcaaatgaggcgaaatacagaatcatttctattggatggttcaaatgagacacagagccattccagatcagcatattctcaaggtctggtgtctggtgtctggtacagcagactcaattcccccccccttcctgatggctgaccttgggggcggagaccttgggacggagtgtttctcttcgggcgggggctcaggggcagggctccaggccggctcacttggtgtttgttctcgtgccgacccacctggtgctcgccctcgtgccggcccacccggtgctcgttctcgggctggcccacctggtgctcattctcgggccggcccacccggtgcttgttctcgggccgggcgtgcggcgggtggcggggaaaggccgccgggggtggggatcggggaagccgccaacaggaggaagaggagacaaacttgagaaagaaagggctaaggggcaggggtctttcactcatacacaaaatcgcacacagcagggaaaatggagcagagcaccatgtgttaacatggatgaacctagcagagagaacaatacttaggaggaaacttgatagaacactgtatataaacggcagcagctgtattaagacatgcactgcagggaggcacagcaagctcagagacacagttatctcagttttggagaagactgtagttgtgatgagaagaatgtttacacgggctccctcataaacatggtggtttcattgcaagctagttagtggataaatgaagtcactggctattttaacttaaatgttgtacaaaaaaaaaatcgttgaccatcgatagagaattttagtggagtaggtgcctatgtggtgtgtgtggtattggcatacagttgtagaactcagccggtggaaaaggaatattgtgaacacagtgtctaaagcttaatggaggactaccattgttctagagactggatacaaatacaggatggttccagttccagggaatctgatgcctgcttctggcctctccaaacacttgtgcccacatgacatacattcacacagtcatacacacatataacatgcataaaaataaaaacaaatcttttaaaaagtaactgaaaagggggctggagagacagcccagctcttaagttcatttgcttttctccccgagtctccgagtttggttcccagcacccacactggatactcaccactacctagaacagctgctctgtaggatgtgatgccttcttctgacctctctgggcacttgcacgcacacagcatacaggcacagacccattaataataggaccgaaacagactgttgtatttattacccagagttcacattgtttctgcccaacgtaattcattttaatgtacaattaaataacatgacaatgcctaggcatataactctgaacttaaccactgctgagtgaatcctatgctaactttcaatagttacaatgctgaactactctcctaaaatcattaagtggggggttggagagactgctctgcggttaagagcattggttgttcttccagaggacctgagttcaattcccagcacccacatggtagctcactctccagctccaggggatctgacaccctcacactaacgcacataaaataattttaaaaatcatcaaatggtctctctgtgacacaggaatcaccctcaagtacctttacagaacattgaaaaccagtatcagtggaaactacaaagctaaactctagctttgtctaatccaaagtagagaggaagcgtttgcatacggagttgggaaatccttcttgtgaattctctcggtgtggagtgcttctaagaatcttctcgaggccaagacccggttctccaatgcatccccccccacgcgcacctcatttgaggtacccacagtggagccttcacttcctcccttgcggagggcaagcaagcccgggtgcaacccctagtgggcgtggcctgcgttctgacgcacagcgaaggcgccgacgcacagcgcggtgtgcgcgcgccgcccgcgggagctcgccggtggctggaacggcagcgacagcgcgcagagcgagcagagcaggcgccaaccgcccggggctcggcgggagctggcgcggggcggctggcggtgtcttccgggcttcggcggagtcatgatcgactcggtgaagctgcggcgcgatagcgcggctgacttcttctcgcactacgagtacctgtgcgctctgcaggactcggtgccgctgcccgccgtgcgcgcctgcctgcgggaaggcgtgctggacttcaatgccgatcggctgcgcgtggtggactgggcgccgctgctcagcacgctcagggtgaaccgcgacctgccgctggtggccatcaagagctccttccagccgtggctcggggagacaggtctgcacagcagggaggtgcgagggtttggtctgagaggagggagcccggtgcaccggaagcctgcgaagcccgcctcacacatccacaaaggagtatttgccgccgtctcccttgcaggttgccgcctctggcggttagctggaagagtagtcaagatagtgactagggctcgagattggcctttctcacagcgaggatgaccagctatgctccccgagggggatatgcaggataatttagccaatggtttaacaatgaatgcttctgccccgccctctttcctttagggttttaattttacaatctcccctcactcttctttgcaagcctaatacagaaaggaagggggttaaaaatggaaagaaaatgtataacaaaacaaatccccttcagggacatcctttatgatttttagaaaattgtgtgagtttgatgacctcgtgtatgtatgtgtgtgcagtgcctgcggagtccagaaaaggggttggtacccctggaactagaattacacatggttatgggccaccatataggtgctgggaaccgaacttgtatcctttgcaataacagcaagtccacctaaccgctgagccatctctccagcccaagggactgtattttcttaacatctcattgtaaggagttgattctggttatttgcagacaacatgttcgcaagtttttaaattgttgacaatccccaagctaagtgtggtgcttctgtagtcattcatgaacatgtgtccagaagcccaaaaaattatcatccgttatgtgtggctccttgcttgattttttttcttaaagtgtttgtgtatcctagtatcggcacatgtgcacacacagagaaaccagaagaggtgttgggtgtcctctggtcaccctccacccattatcttgagcgtgtctttcttgaccctggggctctgtttcctcagcttggctggaagccagcaagccctaaccgttggcttgtctccacctgcttccaaactggagtcacaagccttgcccttaagccctagtttatgtgggtgctgggatatggagctccagacctccagattgtacagcaaatgcccttcactgctgagttgtcttcccaacacctaacctatttttcacatcctcttttctttatatttgcaaacaatttttgtgtgtgtatgtatgtggtatgtgtgtgcatgcaggtatatgtttttgtgtgtagacccatgttctcctgtgcatagaggctagaaatgacactgggtctcttcctctattgctttccaatttatttactgagacagggttgtttttgtttctgttttctgatctctggggacttgctgattccattgtctggttagctcgtttgccccagggatcatctcttgtggcttcccagagattactgcctttcaccttgcaggcgatccaaatttgggtcctcacagttttcctttcgtgaacttttatccattttgctatctcagtccccctttttttttaatttttagagagagtatcatgtaagggaaacaggtgttgggggcaacctagggtttgaatttcatattttgaactcttaattgtcacacatctgaaaagccactgaaacaagcttgttgtggattcttaggattaaagcacactgcatgtgttaggtgtctgcaggttgccagctgagagggaaggtgtgataagctaggagaagtgattatttgaaagcttagccctttgctgggtctgagatgagcaccatttgtgatccttcttcaagggcagtgttgtgatccctctactgtcattataatgatccaaattaaacgaaagatgggagttgcctagaatcgaggcaggcattttatgttgaatataaggagacagcctgtggaccatttcccttcagacaacctttgcagtgtttccatgtcttgtatccaatgagtctaggccatagatttttgacctcttagacttttcatctctcagctgtgtcagcctgtactgttgaagaagctcctggctagttttgccactcctgaactgtttccctctgtgcaagctatcttacttagcacagccccagcacatactggctgcagtgtgtgcctcctttataaaggcactggaatatgagctgtactctagccaaacctgttggaaggggtgtttttcctaatctgtggaatttaggtgcctctccccggtcattccctttgtgtaattagtccaacagtggggcacatttttctgactgtcctcattgtaccaatggcagcctcatcacttgtgttgtaaaagccaactcttgcagacttgcctctgaatttctctcatttttctatccttaagggtgtagccctcacacctgcagtatttatactgtccagcaggtgtcaggcttggatcccttcacgcagtcggctcctactccctggttctcttatatgcaaattgagacatcccttcaagatatcccttaggtgcaaattctttgccttcataagaaaccataccatgcatggtttatgtttatgtatctcatgtggttttgaatggttcatttctgttccttagcagttaggagtttaatactaaagttgtatggttgatatcactgatttttacaatgaatttgttttaggttctgatacacgcagagtttgcagaaatcgtgttcctgcgataagatccaaggacatgagcttccagttatgtaaggctcttaaaggctgcttaagtatatcaagtgtgctaagaaacctggagctaaatgggttgattctgagagagagagatttgactagtttaacaaaggtaagccttgttcatgtggcctacagacatttgatagctggttttggtgggaaaatacccaattcatattttactttttcctctctttagggattgagtaaatcggcctctttggtgcacctgtctcttgccaattgtccaattggagatggaggtttagaaagtgagtcatgccatttaactgttgtcccgggaggctgatctcaggtttgcctgtgttctgtgacccctgtctacctttttgggttgcttcctcagcctgagctgccttctgcgcctgctcagatgccaatccgttctcacttctacagggaaatgcttatcatgcctaagagtgtctgaactttacttacggttgtgatatgccataaaacagtttgtagtgtttagtattctgttcttgtttgctcatagtttatagttttcctttaaggaatatttgtgggatctgggctttgtagtgcacacctttaatcccagcatgtgggaggcagaagctggtagttctctgccagtctggtctatagaacaaagagaataacaagtcatgaccatctccaagtaaaacagctgtaatgccatcatgttttgttttgttttgagacacaaggtctcactatgtagctctagctggcctggaactcactatgtagaccaggctgacctcaaactcaggaagatccgcctgtctctgcctcctaaacgctggcattaaagacatgtgccactgtgtccagtgattttagtctaaactaacatagactgaggacagtgagtaaaccaggagtgaccgaattgacaggatcttggtctgactgtgtgtcatttctcttttttttagttgtttgtcagggtataaagaactctgtcactctcaagaccgtcaacttcacaggatgtaatctgacgtggcaaggagctgatcatatggccaagatcttaaaggtgactgtacattcagccttgaatggatgatgtggttgaagcacattaatactttggtatggggttaaggtgattttttttcttatccatatggataagattgcaattttagtttcattgtatgatgtagccattgtttagcttagcattctgatccttaaagatactcacttaatcttagaaataagactttaagccaggcagtggtagtgcaggcctttaatcccagcactgaggtaggcagaaacaggtggatctctgttagttcgaggtcagcctggtctacagagtgagttccaggacaggctccaaagctatagagaaaccctgtcttgaaaaaagaaagaaagaaagaaagaaagaaagaaagaaagaaagaaagaaagactttaaattataatactttctttattattttagttgttgaaaatgttgcagcactgaaagaaactatactattacaatctccaattactgacgtctctctaactactgtgacttacaaactaaactaataagaacagtacattaaccgggcattggtggtgcacgcctttaatcccagcactgggagtcagaggcaggtggatctcttgtgagttccaggccagtcttgtctacagagtgagttccaggacaacctccaaagcaatacagagaaaccctgtcttgaaaaaacaaaaaaaaggggggaggggacagtacatcaaatctttataattcttacaactactacattaggactgaagttacttaacaatttgacatgaagccttttttgtaggtttctttgtttgcttgcttgcttgtttgaggctagtgggggttgagacagaatagtgctgtgtggtccaggctgtttggacttgctgtgcacacctacatactgccctggaccttgcttcagtcccattccttcagcctcccaattgcaggattagaggtgtatgtcaactcagctggctaatttttgtagtttgctggcatggatcaaggatagaactaagactgggcagtggtggtgcatgcctgtaatcccagcactgggaaggcggagacaggaggatctccatgagttccaggccagcctggtctacagagcgagttccaggacaggctccaaagcaatatagagaaaccctgtctgtaaaaacaaacaaaaaggatagaacaagacccatagaccaaatctagtccatcacatttttttgcaagtaagggtgttgggaacacaaccttgcctagttgtctgcatagtagttggcaaaagtagttggtttcagacccacagagcagagaaagtttacttttggacctttacaaagttaatactttgacccttgtggtacatagtggattctgttttctagtgtggccactcgatttttgtgaggtttttgttgttgttttaatttgggggagtggtatttttatactggggattgaactataacctcacactttaggcaagtgctctaccactgaaggatatcccatcttttttttttttttttttttgacttaaatattttgagactggttctcattatgttgcctaggttagctttgaactcactctgtagccctgacagacactggacctgtgatgtgcctgcctcaacctactagcggctaggattacagccctatgtaaccactagcctaactaagtgtgtggatgctgaagccagccggcctaaatgaaagccctgacacatttagcatctgagagcattcgagagctgcttcacctctgtaaagtcacagttgaccctgagcgtctcatgtgtagttctccctaagacaacattgtgcagtcctcctgggatttattgttttcatgtggttattttcaataggaaaatagcattaacattactcctgtcagtgtcatgtcacagatggctttgctcttttgatgttcaagcggggaggtgtggttccttttaacatcagtgtcccatgttggcaaaatttccctggtgaatacagagaattggttatagtcttaaaggctaaaactatgactaaaaaaccattttttcctaatgcatgccagactctctttaaagatggtatgtgtgccctaagaagtacctgagagccattgggttaaaagatgatgttgcagcctctgtgtgtatctttttatcttgtaaaagttgtacctgttggcctagcagttcagtagtagagcacttcgcttggtgcgtccaaggctctggatttaatccccaacatcacacatgcacacacacagattctgttgtacataaaacatacataaggtatttatacagctttgtgtagttttttgttttgttttgttttttttcaagacagggtttttctatgttgcagccttagctgtcctagagctagctttgtaggccaggttggcctcgaactcacagagatctgcctgcctctgccttctgagtgctaggattaaaggtgtgcaccaccactgcccagatttatgtatcttactaataaccatgatacatattaaatgtttaaattgtattggaaatccctagaggacaggatagagtttagaagtgtagcaatgttaaaccagttctttaacatggcagaaaaggaaagtaaaatttttgaaactttggtgaattatcagtttacataactattgagcagcagttacccataactattatcacaacttgagtcctgcgctgggaccttctgagggcagactgctggcatattagtacttaggtgtggtatgtataatcagccatgcctagtgccctttaggtttcttatttccttctccagcgcttgactccatgctgttatctttgaagtaccagaccatgagaaggcatgaagaaacctgggctgagagtcttcgatacaggagacctgattttgacggcatggctggcttaaggcgcatcacgctgaactgcaacacactaattggtgaccagggtgcaagtgcttttgcagactctcttagtgaggatttgtggctcagaggtaagttaaatgcacttcagaacttataaatcctctaatagcttttattgtatttttaaactaaagtcacatatattctccacagaaaacagttttacctgtaatcaaaacatctaggagtaactattgttcatttaggtatattttcagcctttaaaaaatagttatgtctgtacacttagagattatagcagtggttatagcaaacttgctggttgtgtgtatgtgtgtgtgtcagcaagtaacctgttgtcttttgtcaaaagcgcttgacctgcagcagtgtggcctcactagtgaaggagccaaggctttactggaggccctagaaaccaacagaaccctggtcgttctggatataagaaaaaatctactcattggtatgtcacctctttaaaattaattacaaaataacataacaaaatgaatttgtatatttgaaatttttttaaaaaacaatgtgtttatattctagtttgtattatgtgctcttagcagacaatgcattgttttagatgaactgtactgcgaaattgttctggtggccacttgaataagtatgtgtccaaacactgattcggatactgagcttattgcagtgtacagctagacaaagtcttgctctccatcagtaaaggagttcaaatgtaaatatataagtagataaggaatttcaaatagtaggaagtgcaaagataatttaagaagacagatgggtaactcaactggagagctgaagtgtaagtggaaaactgagtgagcatgacgtgggtgttctgagggaggtgcattttggaataaagcattcagtgtatagtacaagatggcaggatggatggagagacggctgagtagttagagcacttactgctattgcagacgacccagggttggttctcagctcccatgccacctgtaactccagttccaagggatcccttgccctcttctggcctccctgtccacctgcataaacatggtgccaaaacagacaaacatacaaataaattactcaatgaacctttaagaaaaaaaaagaaaaagaagaaaacatgagggaaaacccgatgtgctgtgtggtcaaacaggggccagggccttgatagtgtatggtcttcaatgcatggccctcctaggtgagccggcagccatacaaggagtcgaggtggaaaaagcataatctgagtggtattcaggcagatgaacttggtgtggaggatagtagtggagccagggaggagagaagggacaagttaggaggctagcacagaagtccaagccagaaggaactgtggcatagctcacagtggaaggcagagggtgacagaaggttgaaacagggagtaagaagatttgcagataggttaatgttggctgtgaaggaagtagttgttttcagatgtcctggaaaagatggtactgctgttttactgagaaagggaagctggagtggaagagcattgtagaagccatatcaggactttggtttggctgtgttaattgtcatttagtgcaacctttggttttctaggcagaggtttccaaagccacttcagacctaatgtgctggtgggtgtaggcagagtgttacaataagctaagtctgtgagggagaggggtactcagaagcagatgtgagtcggtgctttagttttatgggaaaaatcagcagttagttggctcctgtttttagtagacctggttggtcactggaagacaactgaacagtctcccttttcttttactttagatcattctatgatgaaagcggttatcaaaagggttcttcagaatgggaggagtgccaagtcagaggtataactcgtttcagtcctatgaaaagattttctctgtaattacaattttcttctgcttttggtaaaattgtcaagatccttttctgctatctgaagtgaaatcaatggctttggtacattggtggcatactggtgagcacagctgcctccagatcaggtggctttactagcttgtttttataaatattgtatcattaatttgggatctgagaactgaaaattgcaaagctttattagtgtagaatatcttcgtcatggccacttaaaggggagtcctcttatggtctgtagctgatgtcacctgactttctcttccagtaccagtggataacgtccccatcagtgaaggaatcgtccaaaaccgctaagcagaaaaagagaacgatcgtcctaggaaacagtcggaaaggaaaagccaccattagaataggtaaccgactctgtccgtcttggctttttagtggcaccaaaacttacagctagcatgtttttaggacaataatattaaagtctcatctcttgggtaattaccagtgttgattacagcatattctgaggcccagactataattattctagtctaagttatgaaaattcatggcatgtagaaatagtaaatgaatcatttggaaggatttctgtttttttgttttgttttgttttctttaattaactaccattactgattgaatttttatatgtaaaataaatactcatcctcttgactgtttcctaagtggtgatgatttcctataacatacagttaagatttagaattccccttcgatgcaggcttagcaaacagtgctggggacagaatccatgcatgggaggcaagagctctaccacccagctacatgcacagcttgattttttttttttttaagtgactgaatcaggtaacacatttcagtgatgtaaaaaccttggtgtaaagcaatttggaagacaagttttcagacctggagctggaacacattaggaaggcttgcttttttttgagattttttttcgtgctgtgttgcccagattgtcccgagacttatgatcttcttgtctcaaactcttgaagtagttgggatttcagggaaacatcaccatgcccagcttaaaaaaaaaaaaaaaaaattatcttagttatgattttgtgtgacaaaattccatgactgaaagaagcttgggaatgaaagggttgtgtcagtttacaacatcacagtccgtcagccagggaagtcagggcagaaacatggagggagtagctgatggcagggatcatgggggatgctacatactggcttgatcctcatggcttgttcatcctgcccaggggtggcacaagccacagtgaggtgagccccatcagtcattaattaagaaaatgacccacaggccattgttgtggggccattttctcggttgatgtttcttcttcccaaatgactctggcttgtgttgagttgacataaaactagccagcacaattctctagtgtgtgttacaagttaatctaaaagtcaagccatgtattagttttgtaattgagtacaaactgaaaggttcttactataaaggcagaggcaagcggatctttatgagttcaaggctagcctggactacaaagtgagttccaggacagccagggctacacagagaaaccctgtctcaaaaaactgaaggtgggggggaaggaaaggacagaaatgcaatttttgttttattaaaagatgtttgtgggttcagtgtgacagtgcacacctttagtgttcaggaggcagaggtaggtgaatctcttgaatttgtggccagcctggattacatagttccaggccagtcagagctacataatgagaccctgtctttaaaaagaagtatctttgaattaggcaatttatttgtagtaagcagtagtgagtgtcctgaacagtagccaagtgcttgctgtgtcaagaggaagtacaggctgtctgcccactgtgcgatcacagcagtgatacttcagcagtcaaactgtgtgtaagtgggatttggagtatcatgctattacctaaagtttatgtcatgagtaagtcttctaaaaagtacttcagttggtgctttgatacacattataaagtgaagtgaaaaggatatgcaatgcgtgcattgctgtggctttaggaatggcatgtagccaggcattagacaattagaagagcaagaatttgcttgttagtattgttggagagagtggagctgtggttgcagtttacaggccactgagtaagaggaattttatttcttggctttgttgctgtttgcctcagttacttggagacatggaggtcagctgaccagtgtcttgctgtgtagagttcggtaaggacagagcctgtatgttaattgtgtcatagttatgtgggaatatatgttcaagaagttgataagaacttttattttactactttttttttcagctaacaagatacatacaaacctttttagtcttaattaaaaatgttatcgtttttctgaaaaatcaaagaaatggggtatatatactgccatagactggaatgcttgttctgtatgaaaaaacaaacatggaagtacttgtgaggtagtggcaggagaatcagttcaaggggattttcagctacacagcaagtttgaggttagcctggactgcgtgagacgctgccttaaaaaataatagtaataaaataaaaaatgcaatagcacaggacgaactgagttcctgcaatttaatagttacactgatgtatgcagaaaatggcacaggactgtggtgattatcagtgagttagttacactgtatgaaatatccaccttgggccactgagacagcacaggggaaggcaattgccagcaagcctaaagacctgagttcgattctcaggacccacatggtggaaagatattactgactcctgcaagttgtcctctaattgcccacctgcatgccacagcacacatacacaaatcagtgtgcttttttttaaaatgactttaaaagaaatatatgtgctatataactacatgtgcttcattttagatggcatcctagtacaacaaaccagagggatatacacgaccattctattttacttttattactttttgttcttttcaaaacaggatcttattatgactggtctaaaacttttgatgtctagggataagattaaatacaactgatttagtaaacttttgttatttgttctcagtgatattagagacaaaaacttaaaatgtgaactttaatatatgatttcttctaataatgtgttaatatatgggtttaactgctacaagtatttcatgtttaattcttagtgttgactttaaggtaagttcctcatttcatctttgtgtgtgtgtgtgtgtgtgtgttctatactcatgtgaagactgaaagtcatcaaaatgaggataacatccactcagtaaccttcagcctttttgggcagggattcctgtaatccacacactgttaagtcataggcaggagggtcgtaagttcaagtgtagcctgaattagacagagaaacccgttttcaaaaaacaaagtttataaatcacttgtactgtaatagccttggcatcgtagtcagttattcatttgtgttctgttaggagtgtgtgaatggtaatctgtagtcctttagtacatcttgattttcttttatgtcttccttgaacatagggttagctacaaagaaacctgggaataatgggagaaaacacgggctcagtaaagactgctatgccccagatcctctgccaccaggcgcgtcaggtttcctgccctggcgcactgcagaacgtgcaagaagaaacaggtaaggtgttctctgtcatgtgcctcagtcctgactgctgtcatttaggagcttctgttacataggagttctcctgttgatttcttaagtggaaaggggtgactcacgcatagcctctgcaaaggagtgccctaaggaaagacaaaaaagcagactgtatctaccaatcctcgggaaccagctatgtttaagtaacctgtcagaatgacattctgcttggtctgttcaggtttttttcataggtgatttagaggtatttagtgctgtggttctatatggatagtgtacataatacaaataagtttaatcatgtagtgtgtatacattaaaatataacttgttgatatccttttaggggttttccattgttcaaaactcgtgatatgcctaaccttctgaaggtatgtatctgtcatgtttctgacatataagggattagagtagaagtgtagggtcagctgaatagagagctctgtaggatggttttccctccctgacataaatgtatttaaagctctctggattcctggctaccatggtacagttacatgtatatgacacatactttgggaggccctttgtagatactatttctacaaaaaagatgatgcttacaataggtttgaccaggggatgaccactcaaaaatgttccaatgttgctttggagtattatatgtattttacacacacgcacgcacgcacgcacgcacgcaatcatgcacaacactccacgtgttcaagtcagggtcacaaacagtccttatcccactgcctcagttctggatcaggctacttccgtcagagtgctgtgtcaccctgtagtcattcacggaggagaacatctagtgtaccaccctgtgtgttggtgttacgctgtatacactaacacattaggaggtcatctcgttctgccactgaagttttgcatatcctgcagagttgtccctagactgtgtacattttcagtagggttatgatcgtcacattagttgttagctagagggacacctcattgaaactagacaggagagttacactgttactacactagtctaggatgcagagaagtgaaggtgaggtttttctggtgggttgtatatgtatgtgacttagtttttaaaaccattctactatttatcaattacagataagcttattgaccttatattctattcattcttttcccctaaaaattatacttccacactctttatgtctcaccttagagtaaatttatcatcccccgtacaaaaattaccctgaaaagaaatgtttatcctggatctaaacttgatttatctaggtggaatttagcaaagtaatgtggacagtgccaaacaataatcagccttatgcagtacagggttctgtagtaacagcaagaataagttagcagctaggtggtggcctttaatcccagcacttgggaggcagaggcaggtggatctcagtgagtttgaggccagcctggtctacagagcaagttccagggcagccagagagctacacagagaaaaccctgtcttgaaaaaactaaaagaaaaaaaaaaaagttagtggcggtttctggttgttaactgtgttaggctaaggagcaatgagatccatttataggtaataacttggcatttcagacaggttgatttaagcagatggcctctagtgtttattatttgtcttatggcattaagttttatcctctttatttaagcaatcagattttcctgtgactgtgacagtagagagtccgtcatcctcagaaactgatgattttgaggattcttcagaaagtgcccatgaagcacctcagaaaatcagcataagacaagatacattacaggtacacagctctcccttccaaggtacagaggaccatttcaaagtgtaatttgcttcttggggaaagcatgattgtgaaacaggcccaggcagctcattggaatactgtttgtccctctgttctaactcttactgtacttagtggtgaagaggaacaaggtgagatgacagtgtgtatactccacaaaataaaaaataaaaatgtggtaccaagtttttctcctcttcaaatcagaatattagctgtaaggagaacgtcagtgatcataaaatgagcttaaggaaattgagtactgtcatagtcagctgattcagtgctatgtgtgtgtaagtgtacgtgcatacataaatacatatgtgcataacatacatgcatgcatgtggaggccagaggccttggtgttaggttagtcttcaattgctatcaacactgggcttgttgtttgcagaggttgttgtttggttttgagacaaagtctttcattggcccagaatttgccaattaggcttggcttcctggtcactgagcctcagagatcttccacttgcttgctgggtgctgggattgtgagtgttccccaccacacccagccttttttcatgttctgatgatcccacttgggtcctgatgcaagtgtggcctgactttggctgggctgtctcctgagcccagtgctgttattttaaagactgggaaattgatagtgctagccaaactcttatcataagggaaatataactttgtttttagtagaaataaaattgagaagaggttcttttgttttaagatagagtcttacgtagctccagctgtccttgacgtcgttgtacctcagtctggccttggattcctggtcttctcctagcctcccatgtaagccaccgcacctggccttggaaaaacttttgctagtgatgttcccctttcacaatttaaaaaatttagaaactacattttattttataactcagtatctaatgtcattctcatttttcctgtttggataggcaaaaaggaaaattaacgtaaattaatttttgtacttatgcatgctgtttctttgggcgctaagtcagagctgatttgtagtaggttgtgggagactttgtctttaggaaggtcgtggcttttcttgtgttatgtatagttaggggaagctgctggggactcgggtttgaactcagccttgtgctgttcagcacacacacactaccactgagccacaccaacagtgactgcttaaaactggtactgtctcagtatagaacttagaaatctagaagtagctctatgtttgttacttacaaatgtaagtaacaatcccagcacccagcaggccttcacatttctgagagccaggacatccaaaatcaaggtccagcgggtgtgctgtcataaggatttctagttcatggatggcaccttctcaaaatgtcattacatggttgaaggacagttacctatttttttaaatatggttgctgccatcagtatttgatataaaaatttaaaaccagggctggagagatggctcagaggttaagagcaccgactgctcttccaaaggttctgagttcaattcccagcaaccacatggtggctcacaaccatctgttatgagatctggtgccctcttctggagtgcagatatacatggaagcagaatgttgtatacataataaataaataaataaaatctttaaaaagtttttttttttttaaaccagctgggggatatagcttcccttctctggcaagcacataataccctaggttcagtccaaagcattacccacccccaaagatataaataccacaacttaattttttaaaattaaaattcacaatacttctaaagagaatcacttaaagtgattctttaataacttagaaaattatacattcttggaagagctcctgtgtggaccatttgggaacacttcatcttgtgagtcagcccctacagtttgttcttagttctttattgctaagacgcagagggaagtaaaatgtgttgtgttggtttccttcaccagcagtttaagagagagggttgtgggtttgtaatgtattgttttccttctgtttgtcctaaatgctggagaccacactttatgcatgctataagcatgctttccactgctatgacccaacccaggagataatgtgtcaaaagtgtttcaagtcactgaggaagaccatgaaaggttcaggcgttatgctggcctgcctctgttacctgccggaatctgctcaggcagtacccggatcagcccagggttccatgggaaggaactaagtctgcacacaggtgcaaaggacccctttaaaagacagacccctgtccatttacgttctctctactctctcctgctcttcttttctcccacctattctctctctctctctctctctctctctctctctctctctctctctctctctctggcgaccggccatggcggtcagccattaaccctgtttctcttctttcttagtctctctactctgccaggcctacaataaactggttaatatgtctaatagtctcatgtctcatcttgcggccccctcttcttttatttctaatttaagcaaaggaataacatttggcacctaagcaaaagaataacaatccaaggttaggaatttaagctagacagcttcttactcagggtgtgctgaggaccctcacagcgtgtcttcattttgagaacagctaaaatgtgtaagcccacagtaaagacagtagaagggattcttacttaactaaaaggggaaggtggggagaaggaaatgtaactgagtctgtccaacatgggaagctatcacttggaataagcgctggggcagcttggagggaacctaactgtgctagggtgctccctgctggtctgagagtgctaagggtgctccctgctggtctgagagtgctaagggccattgtgtgagtattcactgatgacttttgttcgatgcacattttggcatatcagttattttgtggttaaaagcctgccgctggattactgaatgtgtgagtgggaacggactgtctgattataaacctgtctatcttaattgaattcacatgggcattcattctgcattgaccaacggtatattccaagcactcttgagtttgtatctgttacttcacttaatcatcgtgtacttattctccagtctatggatcaggacccagagttacagaattttccagctaatggccaggactttgtaccagagaatcttcagtgtttaggaaaaagtaatcaacaaccaaactttaactactgattactaaacaaagaaatggagattgaaggaagagggcatgcttctacctgttcatttgaagaaaactacattcttaaacacatcttctatggccagggcttcttcattctttattttttgcctgcttactttgtgcaaggcacaggaggtgataggataaatgcttaataaaacatgtttctctccttcacacatcttgcagcttacatgggaaagtgatagtcatagtagatgagacatactagagtatgtgttactagagtaggctgtgttactggtagcagtgtcaaatcctaggacaatatcagaaagctcttaggatacgggtatttcggggccttaaagatgtccatttgatgcacacttctaaatctcaggaggctcaggcaggagaatggagagtttgaggccagacgtggctacataatgagccattatctcacgaagagtgctgagagaaggaacactatacaaatgtggtgttgtgtctgatcttcccacaagggggagaagctgtttcatgtcattacccttggctgtgctgtggagagccagtcagaaatggtgatgtggagagactgttgtcactgattgggtgggactttgcaatgctgccactgttacacagtcatccatgcccctttagccttcattagtgccctgtaagtgagcccattaaaagcattggcaaagcaaaggcaaagtgtagcctcctttctccagttgtggtgtattaaagccattatgttaatcacaaataccggagttggcaacatcttttcctccttttccagaaaagcttggttagttttaacattaaagaacaggattgtgctagtgaggtggctcagtacatgaaggtgcctactgccaggcctcatgacctgagttcagtcccagaatccccatagtggaagagaagttgtttctgacctccgtgtatgcaccgtggcacatgtgtgcacacacatgcacgcatgcactcagcgtgcgcacacacataacatggcataaaatgtacctaacgttttatttttagaaaaggttatttaatcttgtctgtggcctcagaagttaaggtgtattgatcttataaagaggccttgagttcagttcctatcaccttgtcaggtggctcccaaccacctctagctccagttccaggggatccagtgtgcttttctgccctccgcagtcactctacacacatgcagaaatctaccccatcacacatgcgtaataaaagtttttaaagatcaatctttaaggagaaaaagaatttgacgttattaaggcatttaataatgttcagacatacattctgattgtaaaagtactcaattttccattaaaggacgcttttaaagcagtttgttcaaaggaaaacaatatggagattgaatatttcatatctctgttttccataaaaatataacattactttgtagaagattttttaaaattttatgtacatgaatgttttgcattcatgtatatatgtgtaccacaggtgtagggcctctgatcccttggaactagagtttacagttgtgagctgccatgtgggtgatagatatttaactactaagtcatcaatggatccaaactaaacttttaaattaaaattctgcttaagtaactgtttagaagcctctaaattataaacccaggggctggagagagggcttggcatttaaagcacttgctgtgaaggcttaagggctggagtttgaatcctagaaaccaaataaatgtcaggtgtgtgtgatggcccacctgtaattccagcctcagaatgtggagatgcagtcctcagagcaagctgaccagcaagactacctgtgtcactgagctctacatttgattaagaagcctgccacaggaaataaggtagagcaatgaagggcaggtcctgacatcagcctctggcctccccaagcgcgcgtgaacacacacatacacaaatataaagccaagtgtgcgggacatacctgtaatcagggacatgcctgtaatcacagcacttctgaggctaagacctagagatccaggccagcctggcctgtctagtgagaccatgtctcaaaagaactgactaaatataaacatattgtgatgtcttaataagtatgaattttgtttatattaaataaccaagcactaaaatatagtggattatgacaaaagaagttaaatcttttttatttctaagaacttgagtaatttgttgctacaaatttgatggttcaatacatcaccattttatgagctcacagttcttaagtaaaagtccagacaggtcacaaaactgaaaccatagtgtgggccagactgttaccatctggcagtgctggcaaggaatcatctttcaggcttgctggtattgacataatttgactcttgaaggcccatttccttgcagggaaccctaacatatcctgtatgccatctcctcctctttagaggatgtaatggaaaacttctctgatgtcttaactccttttatactaaaaacccttttcatgaagagcctgataccttttattatagtaattttattattattattactgttatttatcgtctcctaacgatgtcatagccgccctgacttaaggtcacttgctgtgaaggctttactctcacatccctcacagcagctcccacgttagtgttggcgttagggagctactccagcagtggggagccttagggactgtctcaggattttatctgccacagtcacacccccgttatcaagaaccatagagtctcagttcctgaaatgatggacaggttttttcctaatcttgataaagaataaggtcggtcattatgctctgaggactgctacctgttcctgctcctgaattcaaagccagctgcacaactgacaagggtgtgttgctctgcttcctctgcctagctgtttctcctacttttcatgtaggatgttgatggttaagttagggagtacctagaaaactgagaataatgcttggcctacaatatagtgctttagaagtgtttacatttttttaaaaatttatttattagttctagttagggaacaagcttgtttcacatgtaagtcccttctccctctccctcccctcacccccatccctcctcccccacccccagcctacccccactccatccacctaccactccccaggcagggtagggccctcaacgggggctctgcaaagtccaccaaatcttcctgtgctggtcctgggccgttccccatgtgtccagggccagagtgtatcccttcacgtgggatgggctctcaaagtcccttcttgtaccagggaaaagtactaatccaccaccagaggctccctggagtgcagaggcctccttattgacatccatgttcaggggtctggatcagtcttgtactggcctccccgacagcatctggggtcgatgtgctctcccttgttcagaccaattgttcctgtgggtttctccaacctggtacagaccccttcactcttcattcctccctctcctcaactaaattcccgatttcagctcagtgtatatctgtgggtgtctgtctctgcttccatcagccactggatgagggctctagttcctgggtcagtcggcggaatcggtgtttacatttttaagtatgcattttttgttgcagttagaaggttcaggtgtgttaagaatgttacagaccctgggtagtggcacacgcctttaatcctgcaccggggaggcagaggcagatggatctctgagtttgaggccagcctggtctatagagcattcaaagccagcctgatctacagagtgagttccaggacagtcagagagctgtacagagaaaccctgccatgaaaaacaaaaaacaacccccctccccccaaaaaagaatgttactgagttttctattatgaggaacccagaaacattttcctttcatggctttaatttgttattggtgattcactaactctgttacatgcatatgctttttatagtaagcactgcaactcaagttagagtgggattcaagtgagtctgtaatgtattcatttgatacattttagtaattaactgcactagctggtatgagtacatgtagttagttaatgatgtatgtcattgtactgtctaaggttacttctggctctgtccctaagttctttgtggactgtgtaatgggacagttgaggcatcagagtgtaccttaattaccatttcttcatactaggagaaactgaacgaatgcctacagcagttgaaggaggaaagggtgatccggcttaaggctgacaagcgagtcagtgaggtaagtacgtcttaataaactttaaaatacttaaaaataataaggtatgctgtattgtgaactgagttgcaccattccaaccttgcattcatttagtgtcatgtaattatattccacaaagtattttcttaaaaatgtaacaagtagcttgccctcccccgcagcttttgagtgccaagtatgaaatgtatttattatgcttatactgtgtgtataagagttggtgaggctgtcttcttatagaattaggaaagcaaacaatgtataaagtcttaagaggatggacactgtggtacatggctaaagactaggggattctgcctagccagacttggtaggttgcttgtgtttttcgttttttgtttttttttttaagacaaataaaaattacaagtctaggataatgaaaacctcataagaatgccatgggagataaatgtctgtaccacgagtgctataatacagcatgaggtggagcctccataggtcccatggtgggcaagggacaaacacaccaggcagacagagcttaagtgggaagtttgggggcgggggagaggaaagggagtggagaaagaagggagaggggatggagaagagaaagagggagaaagagaggaagagacaggaaaagtcctttgtctgctccttcagaggaacaggaaagacagcggaagtgggtggagttttccttttaaagagacctttgcaccttcgtgctgactactagtgacatagcagccatagcaccctgggctggccagggtacagatgacaggccagcataatgcctgaatcctaacaatgagaactgaactacaccattagactgatttgcattaaactaacaagttttacaagtaattttcttctctcttttttttaaaactacaaagtgagtgtaagaagacttcaaaatgtatgtattgtactaaaggacctgtgtgttcattattaagtattgaacacggggtgatatatggcaaaagtacatcaggagcacttgcctttctgagaaacaccagggttaggtttgatgtgttgtatgagcagatgaaggaagcaagaagccacagagaactgctcaagtaagtggagagtggtagctgtgcaggactttaacacaagtacaagaaatacatctggggcggcaagatggctcagtgggtaaaggcacttgtcgccaagcctaacaacctgagtgtgatccctagttgttacatgataggagagaactgactcccaggagttgtccttgtggcttccacatgcatattgtggcacatgtacatgcctgtgtgtgaacacatacacacatgtagaaaaattgtttggtttgtgtcttaggtagggtttctattgctgtgaagagacaccatgaccacagcaacttttttcttttaataatttatttaactttattttatgtgtattggtgtgaaggtgtcagatcccctgaaactgaagtttgtgagctgccatgtgggtgctgggaattgaacccgggtcctctgaaagagcagccagtgctcttaactactgagccatttctccagcccccacagcaactttataaaggaaaatgtttaattggggctagcttacagtttcagaggtttagtcccttatcgtcatggtggcaagtgtgcatcgtgcaagtagacagagtgctggagaaggaactgatatgtctacatcttgttgcagggaacaggaagcaactgtgacactgggtggagcttgagcataggagacctcaaagcccatccccacacttcctctaacaaagccacacctattccaacaaggccatacctcctagtagtaccattccctatgggggccattttctttcaaaccaccacaacttgttaaaattaatccctaatgcattaattacagcaggatcatagtttggtcagactgttgtattttctaataaaaggtgaaacttgggtggctaattctctgatatgcagtgatcccgtatgaatttaaatagttcgggatatgatctttgaaaaatcattagtaagacaataactttattttcatctacttgttataatttcaacaagtgtctcgaggtgaagattattgtgtcatggttattgtcttcattgattaagtactagattaattataaattagttacgtttttaaatgttttagtttagatgttaaacattttctgtagatgatcgtgaggaaaatcatactgttgtgttttcaaccttgttttgtagctggaacatgaaaatgcccagctgagaaatataaatttctccttgtctgaagccctccatgcacaatcagtgacaaacatgatcctggacgatgaaggtgtcttgggcagcattgagaattcttttcagaagtttcacgctttcctggacctccttaaagatgccgggtatatctgtagggtgggcattctctcttcagtggctttaatggtagcttgctgaggaactgaacacttcttagcttccacgagtgatactaatatgtgattatcaatatgtttgatttgttttttaatggagaattccttttaaaagaaatatgaagtggtaaatcttcctcactagaacacccatcataagcagttaataaagaataattggtattagtgaagactaaattaatgtcattgggcatacgaattgtttagttttgtcttctataaatataccccttggcgaattaaaaaaaagactaaattaaagataactttttattgaaaatatttagagtatataggagatttcttgccttttattcattttgcctgttaagtaagtttgagtcaaattcttggccctaggctttaggatggtagttaatctccaggggtgctgtagacacaggaataggtcagtggttctcacctgagaattgtaaagtcaaaagaagatgcaagtcaggtaagacacacacctgtagttcagcacttgtgtggtggtggaaaaagctccaatcaggaattacagataacccttgactgcataaaaacttagagtccaatttgtgtttcatgagtctcaaaatcaaactgaaacgatgttaaaagagagagctgaaggtagttgatagagcagtgttttgggggaacagcccggggctggagaagagggaagccaagaagagggtcaaatgcacagagatggtagaggttgaggctgttgagacagtatttacaatgaaggggtatggttgctacagaaaatcaagtgatatttaatgtgttattgaggtgaatagggtgctgagaggattggatgatctgatccagtggtctcagagcatgagtgaaaggtggcagttggcatgggtctgttgtctgaagtaggcttccagcttttaagattttaaatcttggcgttcatttatacatgtgtttcatgcttgcaggtgtgggtgaatttaagttgttcctaagtgattgccttttcctcctctctgcagacttgggcaacttgccacaatggctggtatagatcagtcagatttccacctagtaggtcgtccccagatgaattctactgttagtgcacctgtggaagagcagatagctctcgaggaacaaaagccagatctggaacagactgctgtgggacagatgcagaatattcaagtaagtagacccggcagacctcggttcaagccattagcaagagtttccccaggccagagaaagtaacgctggtctatctccggcagagttaagtttgtgcccatttcctgaaactgcatcattgtcagtaagaagatggggctaggcatagtagtgcatgtttttcatccagcccttgggaggcagggacagacaggtgtctgtgagtttgaggccagcctggtctacatagtgaatttcagaccagccaaggctacaaaacgagaccttatctcaagggaaaaaaggccaaaactggaaggtttttgataatttatacttagaataagttatctttcgtaaagaaagaatttcaagaataaaataatcggaattgaaagtgttataaatgtctcactgtattcatgtctcgtctaggtctttatctatatgcagtcagcttacaatgaagggacactgatgaaggtacaagtcctggggcagagagcttttaacacaagtaatctagacagacctagcaagcagtgtctcatagtcgcccagttaccggatggggtgggctggctggcataggctggcacaggaccccctgatgtggtttcttctgcctcactaagagcccatctcccagcagccaatctaagacttgtctgaggagctactgtcttgagaactcaactcggtcacgtcatacaggtcatgcttctcacgtatgcacagaggctagaaactaggtttcttagaaatggttttatttatttttaatatgggaaatggaagagaatcatataaaacacaaaattcctccaaagctacacagagaaaccctgtcttggaaaaaaaaaaaaaaaaccacaaaattctaagaacactgtatgactaactctggatacacacacacacacacacacacacactgaattttgagttgccagtcacatggcattatgtaattaagaaaatgagtgaccataaaatcatctgagtggccgggtgttggtggtgcatgcgtttaattccagcactcaggaggcagaggcaggcggatctctgtgagttcgaggccagcctggtctccagagcgagtgccaggataggctccaaaactacacagagaaaccctgtctcgaaaaaccaaaaaaaaaaaaaagaaaaaaaaagaaaaagaaaaaaaccaaaatcttctgagtggtgagctgactgcttaataaggtcacaattacagggagagagagagatggcatggcttaagagagctactcttcttccacaggacttgagtagagtcccgagcatccttgttgggggctcacaaccacctgtaactatagctctgtgggctcctgttccctcttccaacctttgcagttgtgtacacattacacacatacacactgctaactaaaaataataaaaataaaattgaaaagctcagttatagtgaagtttcagtcttcagtggcttgctttgtgtactgaagttttgttttccttgtagtttcagaagattagagatgatgctaggattcctttgcctctcgacacctcccaagttcccatttctacaagagaagcatcggtagcctccagagaccacctgggagcctcagcccctgagccgcaggagggatctgcagtaggactcgcagctaggacaggttcccctttagcagatggcatttctggaagcgggagtcaaagggaagaagcggtgttgtccaaacacagcagatgttcagagaaagctagtgggaagaatgaacactccagaaagagcgcccctgagaagcactccgggaaggacctgctctccgaccctggctcccctgtgaactcaaaaagcaaaggtatcggggacaaccgatccttgcttaatgagccaattaaaagtgaatctttgaaaaaacacatttctgtcaagaaagaaaacagaatagtgactgtctcatccaagacaatcaaaagtaaacccaatcctgtagaacattctgaaaatgatactcttgggtctgattttgaatttcaggaaagcatccattcatcagcacgcacctgacgtaggtctaacctttgaaattatgattttgccttcaatttttaataaattttcttatgtttttattatagtgtgtgataaaatacagagctggaaacactataaggcaatttgtctgtactactatttaaaaaccatatttttttctttttcacttgtataattcatgtggcacatatttatggaaggcctaatttataagacactttctgggtgtgacggcttccagcaaataagattttacccttgtggaactgctactaagtggaggataaaaaacagtaaggcaggggtgtggggctagaaagagaggagagtgaattaactggatgactgcaacattggttaagtgttggaggagtcccatggctggaccccgcttggcatttcctaattcctactagagtatcaggcatcttctaggtccttgactatggtgaagtttgcagcagctttagtaagggtttgctaggtcattttgtaaataaattggaggaaacagtatatgaatggcctgagattgaaacaacttagaaattggtggtacagatgcagtttggactggatccagtgccctgaaccatttaattaattaccctgttcccagttagttgcaggatagttcaaggaagctgccaaaaaaaaaaaaaaaaaaaagctattggacaagagcagggctgtcagaggcagatctgtccctatcccacctgggcagaatatgaacttgcctctagactaattatccctgcctggcaagacagataaatcctttgctacaaccagacttcgtcggaggtgagatgtgagaaaagctagggctgttagttctcttgtacacagccctgcctgactgttgagtaggctgtgagttggttaatcatggattgagtatcacaggaacagggaagaaactgcacatacatgatgtagtctcagcccttcaacagaagggaagatgtcttaatacagtgttatattctatagtggcaatgccaagaatttagtttttggaggagggaggccatctaaagagaacaaaggttgtgtcttcattcagaatgtgattagctcacatcctcagtaaagtcttagccaactggttagattctggtgactgaggaaatgaagagaggagatacccaagatggggagcagcatatgcacagataaagaaccaacctccggacacaagtatgagcccactggagccatacagacagaggccagggagagcacaggtcttacagttggcgctgcactggggtaggtaggaaaaaggagcaaaaaccgaaattatgtgtatgggtttttgttttttgagacagggtttctctggctttggaggctgtcccagaactcgctcagtagaccaggatggcctcgaactcacataggtccgcttgtctctgtttctcagacttactactaatctaggaatttccactgatatatgtaggtgagccatctccaaatccttaggaatcaaatctgtatgatctgccccagtctgttttgttttcatgaaatggggtctcatgtagcccaagatgaccttgaacttgctttgttcaacttgtggccatccaccatcctccctccgcccccccaagttaggttccattttaaagagcagaaacaggaggcactcgctcatcttccccttcttgaccatctctgtcttggggaagcatctattgctggtcattcacccacttttccccaggaacagattctggcattctgtcggccctgctgtgtagtccctgctatgtacgggggcggatgagagaggcggctgcaaagaccaggtgcagccacttgccatttattttccttctctttcccttcccttcccttctgctttccgctttggtcttacctgggtctgcaatcattccactaggttttactattcctgaaactaaaacctggggtcccccacattcctttgagatgcagaacctgatgtgcagcttaggttttgtttttgttgttgttgtttgtttagtttttactttttctttcctttttctatctctcctgctttctctttatttcatgtctaagtttcagagtgtctgttgttgagattcagacattaagcacgtgatttattgctgtgctgcgaggttttgcttggatagttcactagcttgtgtgtagaggtatgcaggtgaattaaagggaaagagacacagaataaaggtggcaacaccaaacttttattcttacatcaaataagctccctccctagatgagaaacacttctccactatccctgcttggccactcctggctttgtctgttgtcggctgtgataaaagagctcaggttagatatctaaaagccattgtcaaggtgaacaaccaaacttgctacttcagcttgctgtgagccacagacttcagagtgaaaaggacagtagagagggaaattttttagccttaagataggaaggaatgttatttccttacctcttgactagctctgccaaaatgtgttaccagtgggcagactttgggctggatgtttgcagattttttggcctcttattcaagaataaaacaagggagagatagatggctcagaggttaagagcactgactgttcttccagaggtcctgagttcaatttctagcaatcacatggtggctcacagccatccataatgagatctggtgctctcttctggacttcaggcatacatacaggcagaacactgtgtacataataaataaacttttaaaaaaataaaacataaataaaggcctacatggtctacaaaatcgcaaagccacagaacaggtccaaatacattgcaagaaagtcatgggagtaaagatacttaagggctgcaattactgtttggagctttgttttgtggggtttgaaaagggaggagtttggctattaggagcatagtttggatgattctcttattgattgacatcctttattaactcccatgtcccttctcataatgcatctgcttttaatcatatacacacaccccaagtattcacaggcataagttggcaagtagggattccccctaaaagttcatttggagacatagcttggcatatacccagttctagctggaccagggaataagtctgaaatggaactgtccaagactgggctggtgagatggctcaatgagtaaaggcacttgccaccaactttggtgacccgattcaatccctagaacccacatgggaagaactgcaagtgtgctgtggggtggctcttcagagtacttgctgctcttacagagggacctgggtttctgttcctagcatccacggaacagctcaaccttctgcaactgcagttccaggggttctgccccacttccagcctctgggggcacttcatgtatgtggttcacatacatacaggcaggcaaaacactcataaaaagaaatcttaagtaaacccactcttgaaagtgtaccaggtttgttggagaaaggagaaagtctgtttggagtgggtgggtgtgctgctcattgcagaaacatttgctggtaggtttcttccttagggatgggagtgcatggatggtgtattcaggtcaggctctcaggttactaaaggcatttttagtggaatactgtgggcacaacccaaacctagtggagccccagcctagcaaacttaagctgcattccttgaggtgcccttgctatgcaaaggaaggctgtgttgttttgttttggtgtgggactgtttgtttttgaagcaagttgaactttgttactttttaattattacattttctttattatgtctgtttgtgtgccatggcacattgtggagaggtcagaggacaacttgtagatattggttctcttctccaaaatgggagttccagggagttaggcttggcagcaagtatcttaacctacttagccatcttgcccccttactttaaaaaatactgttatatttctttttttggggggggggattgaggcagggtttctctgtggctttggaggctgtcatagaactagctcttctataccaggctggtctcgaactcacagaggcagagtgctgggattaaaggcatgtgccactatcgcccggctgttatatttctttatatattgtgtgtgcaaagtttcatgtctgtgaagagatttcacacagattttaagcagtagggctatgagaaaggcatccaggaagaaagtaagacatctaagaatgtgtgtgtgggcttctcaaaggagaggccctggcttttgttggggaggaggagtggcaatgaattgttctatatcctgaggttgctgttagcatggatccacttctgtgtattaaaatgtagagaactctataccacagaaacgaattttactgtataacagtttttttttttaagacttatttatttattatgtgtacagtgttctgtcttcatatatgcctgcaggccagaggagggcaccagatctcattacagatggctgtgagccaccatgtggttgctgggaattgaactcaggatctttggaagagcaggcagtactcttaaccactgagccatctctccagcccactgtataacagttttaaaacttatagttgggtccctctgacctttcacctgatcaagataaggaagacgtgttgggatggccatgcatgactgcagttccagtgttcagagctgaggtgggaggggaaaaacaacttacaaaatctaggaaggcaagatgatgtcatctaacctagatgttttgttttgttttgtttttccatcaaacactaagcttattcttttggaaaaccctggaaccttgtaaaagtgattcatagaaggcaaagagaaagtataagatgcaaaggtcctaaaattttgttgcgaaaaaaaagcccacaataaaaatctaatctacttactatgtatacagttatctgaatgcatacacaccagaagagggcaccagatctcattacagatggttatgagccaccatgtggttgctgggaattgaactcgggtcctctggaagagcagttagtgttcttaacctctgagccatctctccagccccaaatctaatcctttttaaaccaatgaaaatagattaaaatgaattcaaaagtcctataagtaacttctttccatgccatatagtgaaagcagacaacaaaaggcttgtccacctggaaacttttacatggaaatcatgtctgcaattatgaagaatttgtttgcttttaatttccttctcccccctcatcgctccagtcagtgcttccagcattacactgaaagagtggggatagtgtgcaactctgccacattcctgattttgttggtttgcttgttttgtttcttgttttttgtttgtttttcgagacagggtttctctgtggctttggaggccgtcctggaactaactcttgtagatcaggctggtctcgaactcacagagatccacctgcctcccgagtgctgggactaaaggtggatgccaccaccacccggcttcgttctcgattttaatgggattgctttgaattgttcatttagaaagatgctggctgtgggtttgttatatgtggcgtttattacatcagggtctgttccctccagtcctattctctctagcactttcaccataaaagaacattggattttgtcagttttttttttcttgcatctgttgagatggtcatatgattcatatgattttcaagtccatttatgtgatttattgcatttactgacttccatatgttgaagaaccctgcatttctgggaagaagccatcatgaccatggtgaatgtcttggtacgtatccgtatttggcttgctagtattttattttattttggtctttgagacaggttttgtttgtgtaactttggagcctgtcctggaactcactatgtagaccagactggcctcaaactcacagaaatctggctgcctctggttcccgagttctgggattaaaggcatgggccatcaccacctggcacatttgtagggttttttttttttttttttggtattggcgtatactggcttcatagaatgagtttggagtgctgcttctgtttctgatgttgtttgattatttttagtaatttaagctttggctataaatctttcaaagtctgggattttgttgtgaatccatctgggcctggactttttttttttttttttttttttaattcagaatgcttttcattactgtttcaatctccttatatgttaccaatctatttaggttcttgatctctttttggtttaactttgatgatttggatgactctagaaaatcatctatttcttttacgttttctaatttaatggaatagagtctttaaaaatattaccgtattctgaatttctttagtaacagttgtaatgtttccttggtcatttctgttaattttggttctccctttctttcttttggttacttgagccgagggtctgtcaatttgtttatcttctcgaagatccagctcttagattcatttattgtttgttttgttttctttgtttctatttcattaattttaatttgacttctattatttcttgccatctactgactttgagtttcatttgttctttttccagatttttgagttatatcattaaatcatttacttgtgttctgatttttttaatgtaggcacttatgggtatacatttccctcttagaattgctttcagtatgttccagagggctattttaatttaaaattttagatttatttaatgtatatgagagctttgcctgcatatgtctgtgcacagcttttatgcaatgtccacagaggctaaaacatggcaccaggtaccctaaaactagagatacagaagtttgtaaacctccatatgggtgatgggaactgaacctgggtcctctagaagagtatatagtacttttaactccttagccatctctctagcctctgtatcagaggttttattggttatggttttgattttcatttagttccagggatagtttaccttcttcttggtttcttctttgatgtattcatcattcagtagtgagtttatgcacttactagagatttctttactgccagttttgttttatcacataatgctcaggtagtgttcatggaattatttcactttttctgaatttgttatggcttgttttgtgttccaacacatgctctattttatagaggcttccatgggttgctggatagaatgtgtattttttttaaaagattttatttattttaaagattttatttattttattttttaaagattttattctgcttccatgtatatctatataccagaagagggcaccagatctcataacggatggttgtgagccaccatatggttcctgaactcaggacctttggaagagcagtcagtgctcttaacctctgagctatctctccagcccagaatgtgaattctttagtgtttgtgtagaattttctgtagatgtctgttacactcatttgatgtctgatgtcattaattttgatgtttctgtctacttttctgtatggatgacttgcctattggagaaagtggattatttaaatcacttactattactgggttggtattaatctgtgcctttaattttatgaagttgggtgcaccagagttttgtgcatatatgtttaggataacaatgtttttttttttttttttattaatcgttcccttgattagaacgaaatgccctctttctcttacctttaaagtctgttttgttggatagtaggatagcaacacctgcttgctaactggttttatttgcttggaatacttttttccatcctttcgaattaagatggtacttatctttatttatttttattttttgatacttatctttaaagctgagtttcttgtagacaaaagaaagatggattgtgttccttgatgcattcaactagcctctctttttactagagagttgaagccattaatatttaaagttattgtttaaagatatgagttgattgccatcattttttttgttgccatctgtgttcttgtttgtgctttataatttggtttctttttagagtctcttgtttatgcgtatccctttcttcagttcaaagtattgcatccaatattctctttagggttgttttggtgggcatgaaatttttaggcttttgtgtcatgggaaatgtttatttcttcttctactatggcagatagttttgccaagtatggtaccatgtatcatagattaacaaaaccctgagtaccagacatgagaaacctctgagttgttggtcagagtagttcaaatgactccaaaacaatataggctattgctgttgcccttcgttgcctctgaagggttgaaagtaatctcatattgctgaagataccacacacttcaaacatagactcataagatttgagctggatctgacctgaaaacttctctcctacattctaattttcatagtaccagaaagtactatgtaaactgccaagggatggaagtaatctacggttctatccagctgtgatgcttgtgaaccacaataatgatcagcatgacaagatatccctaaagttgcaatagtggtgctcatatcttggtggtaaccagcaactgtttaattggatttaagactcactcaacaggagagaaatcatgcctggtaccagaaacctagccaactacctggggttagtgaagtcctagatcttagaagagaaccaactacagcaactttactagaccaacatatttcctaactatattctaaaacttgttcttatgcccaaagttaactttcactcctcaccaaagaagcatccctttgcaccaaatggaaacaattacaggaaataacaactggtcataatgcaaagataaatggatcatgatcatgagggaagcccagctccaaaggccacatctacaacacaatgcctacacctaaagctctgggaactctgaagaggggtccaaaagagtgtaaaagccagaggatcaggggagtctgctatgatactgtgtctcctagaaatgacaggaaatctacacccatgatacttcaacaatgttggttgcccaaacaagacctgaacaaggatgaggaaatccctcagtgtcccattcctagaattccctagacaaagaactacagtcaactaatgactgctgagagagggagaattagcttctcttggggttttctgtaattgtctaagttccacgacaaccaccagttggttatccaatacaaagtattgaaatcatatacatccaagtcatactaaatggactcctcatgttgtatatatattatgcatttatgtgtatgtgtgtatgtgcatacacacacatggactattcctttacactgtgtgaatatacgtcgctatgattgatttaataaagaagctgcctggccaatagctggacaggtagaggttaggcaggactagcagacaaaaagctcaaagaagaggagttgtctcaggagtcatgaggaggtacagaagaagcaggagatgaactttctgtactgagaaaaggtaccaagccacatagcagagtttagataagaaatatgagttaatttaagttataagagctagttagtgacaaactgagctatcagctaagtatttataattaataataagtctctgtgtggttatttgggaaatagctcatgggacagaaaagaaagtatgcctacacacacacacacacacacacacacacacacacacacacacacagagagagagagagagagagagcaataatcaaagtaaaaggggccatcaatttgagagtgtataagggggcatgggaagggttagagggaagaaggaagggaggaaagtaagattttaatttaagaaaatttaattaaaagggaaatcaaattgcaagctatttagaattaataaaataaagttctctaaagctaaggaattctgttagatgtgggctagagaaaattttacaggtcttgctcttcttttcaggaagtaggaaaacaaagtacatgaaatcaattatctaggagccaaaaatttatatatataacataccaaaagaatataggaggctggcaagatgccttagtggataaagcacttgttgccaaaactgataatctgattttcagcggggatggagagaactgactcctgcaggcacggcacgcatgcacacacacacacacacacacacacacacacacacacacacgggggggggggagtgacaccccaatacaaaatgaaaaatataatcttaaaaattatttaaaagagaatgtagagtagagaagttaataaaagagtaaattatatcaaactgaaaagatttttaaaaattaaaagacaaagccttgaagcccaatgaaatgtctccataaggtaaaggcacttgccactaagactaaggacctggaactcacattataggactaactccttcgcgttgtcctctgccccccgtgagtacttagtgtgaattgtgcccaaacacacacaaaaataggtaattttttttcaaaaaccagtccttggagaatataaagaaggtagaaagaagcaattaacaacaacgaaacttacattggaaataaaaatttaaaacatttaaaaataaaatacaggtgttttgaattgtaagagagggctatttacaatttattttaaatataattgtctaactttgttgtagtaaatttgaaggactcacagaaatatgacttaagaaatacaagttgtggggctggtgggatggctcagaggttaagagcactggcttttcttccagaggtcctgagttcaattcccagcaaccacatggtggctcacagcacagccatctgtaatgaaatttggtgccctcttctggtgtgcaggtatatatgcaggtagaacactgtatacataataaatattttaaaaaaatacaagttgtaaaacttgatgaatgaaatagagaaaattgatttaatgtctattaaaaggaaaaaagcagtggtggtgcacacttttaatcccagtactcaggagggagaggcaggtggagttctgtgagtttgaagttagcctggtctacatagtgagttccaggccagccagagtgatgtagtgagatcctgccaaaaagaaaagggggagtgggaagaaaatgaacaagactcagtttgtgaaaactaaggacttttttgggacagacagaaagccgaactgttttgctggcatgaggttaaaacagtaggaaagcccagcagggaagccatgcaagccaacggttttgaatgtagaaacaaaaccagttagaatgtgtggacataatagatccccgtttgtaataactgtaagaaatatctagggaagaggttaatatgcaatcaggaaggtttattaaaatgtttaaatgacagatattaaataattggtgatagttctggaaataatatgaggaaatgatcactttcagcattgttgatcatttttttaacatggacaatttggcagttatgtaataatttaaaatgtttctcccttgttttaactgtagccatgcagcataaagaaatcctcatgctaatgtccaaagagccaggtgtgagaatgtatacagaagcattttcctaaaaattaggaaacataattgcacataaatgcaagaattgttgtacaggtgtataccaacctctgccatgtaatattctgcagcaaatacagcatgagcatgaaaatgttcctaaacatactgaactgacagcaccataatcagtcataccctgtggctagcgtttatgtggttcaaacctgttcacacctacctaatgtatacttttgtccttgtgcccagaaaatagctgcagaatatatacaggggttactctgaccaaaggcagctgtgttgagagggtgggaatgactctacttacttatgtgacttttttttttttaataagcaccttttttatgtctgataagtaaatttgtaatttcccctcatagaaaatttacactatgcaaacgtatagtcaatctattattctttgttccctatgttcatcctttttttgtttctcctagttccttatccactcacatgaaaatgagcttaaaacttttaagaacatccagatagtgatggcacacacctttaatcccagcactcgggaggcagaggcaggcagatctctgtgagtttgaggccagcctggtctacagagcaagtgccaggatagactctaaagctacacagagaaaccctgtctcgaaaaacaaaacaaaacaaaaagaccccccccaaacaacaacaacaaaaagtaacaacaccctttcttttaagaactgggtccacagtgttgatgtattgtctttaactgtagcccacagtaaaaaggaattcagagtgaatgacatgcacagcgaaggctggggccgtagctcagcatagcgctcacctatgcataacccctgcgtttgatcctgccccacctgcctgtgtgcacaggaatggaaaattccatcaagcaaggctgtgcatccagtgactcacacagataggggctgttctagtttgtgtccttagaggaaatctgttcacagcttactctttcacaatccaccacagatcacatcctgttgtttgaaaagagtttcccacattaaccctatggaccctgacaacactgttccctgagcacaggtttgttccaccttatgggcaaaaggcattgctgcgtggctgtcttacctccagagcctagctctcttgagtctgtaactgtcaacaggtcgttttcattaaattcccttggaaacatcttttgtgcactaaaagctttcaaagtgacacatatttctgagagctttcaaatcctgtttggacaaaatgaagaacaagaagactgtctgtgtagaaagcactcactgggcatgcctcactccccaactgccattgaatgtccccaggagggaaagcctccagtgagggcttgttgctcagtacagaatgtacccagcccgaggggctccagtaattcgtgggtctgaggtggatcaaacctgaaaataatgggcaagaaaggagaccaagcagggtttttgtcaaggtctgactttattgattattacaaggggtttttaaagagaaaggaggaagcagagaaaaaggaggtggggaggaatgaatgttaattgctctcctgtgtttacctcaagcactaacctaaggaagtggggaaggaataggtgttaattgcttctcaggccaggtcacggaacctgaggggtgggatgctaggctagctgtcggctagctaggcatgcgggtcgccaaggctggcttctgacaagaatgtaaattttaaaccagtgtgaatttaccaagaaagaaacagaggcacttcagaaatggataagaaaccctccccctggatgacataatcattaactttgttcagggaggtcttcagagatggattatttgttcagtgttttagaaagatagtcctcacattccctggcattcagaggaggtgtttatctcttcaaaaaaacagacagccaccataacagcttatcgatagatagatgatcctagctgaggatcttcaatggtaaaatttgaatagggcctgaaaatactaaaatcattttgcctaccagtctgctctgattcctttgtcaaaattatgtgtttctaaatccaccaaagatggactgtgtaattggacagtagacaggagaccttctctctttatatcatgcctcactaacctaccagataaaagtgttctcttgcttttgaagaaaaactgaaggagaatggggcttttaggaggcttcacagaagtaacaggagcagaagcaggattttcttgccccctggttcttcccagtgtgaccttttgcactctttcatccacagtgtttattccacagtaaggcacaagtgagctgtggtcagaggccaaggctgtgagtgacactccagcctcagctgctgcttcccatcaaggggctagaactgctgacctggagaatctgttgtttagtagatggacacttgggctctttctctctgtagtaatagtaggtttactgtgaatcctttactaggggctaacatttagaccttttattttatgttcaactagaacttcaggtctacaggtctaagaccctcatctgtccatgattcttctatgcctcccaagtgattcctttctttctttctttctttttttttttttttagttctttccaaaaacctgaggtggttcatgattatttactgcctttttatgtccaggtttggtcagtttgagggccatgatttttctataaaataaaaatatttttctctaagttctgtgtggtggcacatactaatgggttccctgcctccccaccaaccaacagcaagacagcctgtagccagaaagagacaacagactgctgactgcttcacagcactggattgcttccagctacttccacaagttcaaactccagtcaggtgtcaccctgtaccacaactgccatgtgacaccttttgatggaccctgggcaagaaattgcttcagattttaatttcctatattattattattattattatttgtatgggtattttgactgcatataagtctgtgtacaacatgtgtgcctcataccaacagaagcctaaagagagcattggatcctttggaactggtgttataggcagttgtgaggtgcagtgtgggtgctgggaatcaaatctgggtcctctgcaagagcagccagtgttcttaactactatctctccaactcctagattttactttcttcacctcaactgccaagagaatgtaataatgtatgtgatagttcatttgcccaaataagggcaatgtgatattgctgccatgtatgagttggagaagttttatgccttcatttgagtggatagcataatctctgaggagcttgatggacgtcctactaaggaaaatttagggtggaacactggtttggcggaagagcttttagattatagcaggaatagccttgagtaaattcaactcatggtctcttcagatccacttcagagcccacagaacctggtcgctgacctcacaaggatgcctgaaggaatgggcatggggagcagcctctcagagaaatctctcacacagtcagtgcccttcccaggcaggacagcagcaacagggcaccatgctgttttttcagaagccagcctaaatatgtaggcgagagcttgcctccttggaggttcggaaagctaattttcccctcttctttgcagactcccatcctaccccccactccccgccatggagtgattcattcagtctggtggtgggagaggcaaacatcttaagctcagggcctctccacttctggatcttgcctgtctcctccaggcagcctacaatcttcctccttttgcctcttttctctagctgattcactagttctctctctctctctctctctctcatccctccctctctctctttcttggctttttgagacagggtttctctgtgtacctttgtagatcaggttgacctcgaactcacagagatctgcctgcccctgcctcccaagtgctgggattaaaagccacctcgcagcttcactggtgcttcttctgcctatgttgcaaggctgggtgtgtcaggtctgccattgccacctatgtaaactccagttgttggggaggaaagggaagactattgtggatgcggtttccagtttagttgacaatctacctccaaagtgctgagccaaatagtggtggcgcacacctttactcccagcactcgggaggcagaggcaggcggatctctgtgagttcgagaccagcctggtctacaagagctagttccaggacagcctccaaagtcacagagaaactctgtctggaaaaaggttaggtgggatcaatccggtcaaaattaattcaaatataaaaaataaataaggatagaaagagcagaagctaatattttatttctataggtgcttattgtacttctgataataaatttcacttatgttcaaagctttggagggaatggataggcttaattagtatttaaaaacccaacacagatggtcttccttaaaaaactgagggacacagcagcaagcttcaggattctacctccatattgttgctctgtcgtgaggaaatggtctcacatccattaagcagcaaatcaagctggcccagtagcacaggcctgtaatcccagcctctcaggagcctaaggcaggaggacagcacatttgaaacttacctaggtatggagtgaattcaaagccagcccttggtaactcagtgaggccttgtctcaaagtacagcaattaaagaggactggagatatagttcagcagcaggccacttgtttcaataagttagaaaacagaactatcatatgatctatcctacacctctggatatccaaaaaaattgaaattgaggccttggagttggcactgtcctctctctctgtcttgacctgtagaggtgcaagcatgctgcctcaaattcctgctgccatggccttctttaccagggtagactgcatccccaaaccaggcagctacctgggaacacagaggccactagagctgtggagaaagggacagtcaatgtctcaagctgtcagtttcaccagcacagtggtttatgcatgtctgtaatccaagtacaagaggttcggggctttcaagtcatccttggctaattcgtgaatttggggccacttggatcacatgagaccttattttaaacaaaacaaaacaaagcaaaacgtatcctcaagatgctagtgtttcaggtgttctagatataatagtaagattccagaaagccacagaggccagcacagacacggattcctttcatggagtccctgagaggccattattgcatgaagctgtgacagtgaagcctgaattgctgtggagatcccaagaacatggaacatagagcctcctccaaggaacgatacaggtattgagtggtgctggccagtgagagaattccatgggctacagacaacagaactgcaggggtgggaatgccagatctgttggaggacagatgatgctgtgagcctcaggtgctggactcagaaccgtatcgtctggtgtttgatctgccaagcagcattgctttagtcctgtctctccttgctggggtcccatgcttccactttggaacaaggttactctgtaatgtattttgaaaacatacaattttttttttttttttttacagtttcattttattctatgagtatgggtgcaactcctacatgcaagtctgtgcaccacatggaggccaggagataacataggatcccttggagctggggttgtagacagttgttagccatgtgagttctggcaaacagaaccatttctatagttttcttacaaaaggagaggtgagatgtttattctctgagtttttcgagccagaaaaataaaactaatagatctcagatgttcaatctgaggtggcaaaatggaaagagcagagatgcttttgagaaataattttacaacatttttttatttagtaggggaagcctgaccaccacctgtagccagcccctaagtaggcgtggctacaagcatgtgtagatggggactgctgggtgtcacagtgctcctgtggctgtcagagagtaacgtttgagagctggttctccccttccacattgtgggttctggagacggtgcttaggttgccaggctctgaggcaaacgcctttatcctctgggccatctcatcaccccactaattattattgtttttttttaatgtttgagacagtgcttcctgtagttccagcaggtctggacttgaatttctgatattcctccctctatctcctaagtgcttggaatcacaggtgtgtaccagcactcttggcaaagatgcattgtttaagcacgagaatagataagaacattcttgtatgatttatgttttccagtaatggactgtactccgaattcagctgtgtaaagttatatgcaatttagagctataaatatttaaaataaagcctttttgcttttgtaacatcacctcacaccttggttcagtaaaacatgtgaagtgctgattttctgttgggacatgtaactcagcttaggtaacctcttcacacggaggataatgaatttaaatgtctgggagatggtgcaaatcactaaaagtcctcgggatttggagaagaggtcttggtcagagctgtgtaaaggagaaggaaaagcaaggcatacagatagtgtatgccttcgagggttcaggcactttcctgaagacagtgtaccttttgctggggttggactattcccatttcattctgatactgtgatttagtgagtactgcctacgctgtcactaggcactgctgggtgtgtagtaggtgtgtggctcggaggcactggagtccttccaagatgattttcagcccagaaacaaggacagagagtcccttcttaatgccatagatggtgcaatcactagttctggttagcccttcaggcaactgccagaatgagtgaatcaaaccaggtgaagacagaagtaaaagaacagcatttgtgatttttgtttagctagtccctgatgggcagccttatcttcgtccagctaggctgaggtttgttctatgactatcatgtgtctttcacccaaacttgttgcagttatatttccatcattttccattaaaagagtctaggagtgcagttcaaggcactgagcacaggccaccagcacactcaatggataaagacatgtaaaacaataataagaaaataaagagtattaagaaaatgttctcctggccccatattttgaagggcaagcattttatttacagcagggaggagtttctgaaaataggtttcccaagaaaatgggttgcctaccatacatacccttagggaagatagccattgtcagcaataggagaaagactggggaccaggacaaagtcaacatccagcgtggtgattaccagatgaatagaagtgggaatcagcttggaatgggaagatgtcacagatctatggagagaaatgggaaactttagcaaaggctgtgaaggcccaggagatcaaatccatggctgttgagatagcagcgccttgtagggcacagagggaggcctcaggaaccctctttcacagcctgaatactgttggaaaggatgcaccgggtgactgcccatgaccaggcagcagtgcactgccgtcatacgacagttcagcaacttccactgctcatgggcttcattttctagatcttatctgatcatgcaggtgcagcttgtgttctgctgagccgacttcttcctaaggagaaaagaaatggcttcaccgacagtttgaaaacaaggcagtatgcatagcgaagggctgtttttgctaaaacagaaatacagcaatttgttgcctgttccttggtccggtgactagatacttgtggaccctggacacatcctcaaattgggaattaggggtgtagcacagtggcagcatgagctcctggtttaatcctcagcactgcaaatagaacagaacaaaaccacacaatttgagttcaccttctccctctgtgaaatggggaaataggtaccagtaacaagagatagaccgtccgggtgatggtggcacacgcctttaatcccagcactcaggaggcagaggcaggtggatctctgtgagtttgaggccagcctggtctacagagcaagttccaggacatgcagagaaaccctgtcttgaaaacaagcaaaccaacaaacaaaaagggatagaccagtgaggccacagatggaaggcctgtctaccctgcagtgccaaattatccctttgggccactttataaagtaagggacttggcctaaacccccaagatttgtgacttgaattagatagttcaaaatcaaatgctatacactcacatttatatacagcacacaaggaaactatttcaaggctggctcagtggctaaaacactttctgtgcaaagcttatgatcacaagtttgaagtgaacttatactacatactgagaatgcctaaaaatgaagagtaaagcaagaacacatttcatatttaaaaaaaaaaaaaagatcctgatcctggggctggagatggctcagcagttacaagcaccatgctttccagcaccaaggttgggctgctcacaaccaccttaaactttagctccagggtatatgatgctctcttctggcctcagtaggcacgtgtacacacacacacacacacacacacacacacacacacacacacacacacagagagagagagagagagagagagagagagagagagagagagagaagagagagagagagacttaaaacaagtcctgatgctaaacaacagaaaaaagaaaagaaaaaaaatccaaatgccctaaaattgggcatagtgggacaggcttgaaatgtcagtactagaaaggggagatgggcagggcaatagggcaatggaggttgtggaaactggcattacaggggcactattgtctaatgggtatggaactcagtgtgggaggacagtggtgacagtcacacaatcatgtgaatgcatttggtgccattggattgcacttggaaatagtcaaagtgatagatactgtatggtgataaaaaatgaagaaagaaggctaaagaaaacagagatggtaaagtgagtaggttggaattaacctcctgtgaatgttggaattaagaatgtaaaagatggtaacagatttgactttgtttctttgctacactcactgtggttactccctgtgggggtttgaatgaggatggtccccacagattcatatttgactacttggtccacaattggaggaaatattggggaaggattaggaggtgtgacgtggggctttattggaggatgtgtttcactgggggtgagctttgagttttcaaaagactggcacctctctctgtctgtgtgtctctgtctctctttttccttctccctcccctcaccttctctcccctctcctctcatttgtgcatcaaggtggggtctttttgctattcattcaccccatccaccattatggactctatccctctgacacagtaagcctgccagggcctggcctatgtcagtcccacgctacagaggccatctattctggactgatgtctttagggctgcaattggagacagctgaacagccctgggtccaaacctgagttggggagtgtggatcgagaaattcctagctacccaatggcattaaggatgagacagtgacatcttgtcatctcaggaggactctcagtccatgctggagtccacggtttattcaagcatcctcttaaatagctttccaaaagtcggggtgttagcagaagacatctattatcatgtataaagctgatatcaaatatttcctttaatcccagaggcaccctaaaactgcagtcctcactagtccctcagaagtttccaccagtccccatgatggatgtgggtccacccaggggcctaggtctattgttgcacagactaggagacattctccaccaaggccaggcatccgagctaaccagctgacatctgaaagacaatgggagattcaagctcctggaatcgagatgaggtttatgcccaaaatatcataattgatatttgggtcccgacataagccaaattaaatgttttcttttagaatcatcatgtgggttctgggacttgaacagaggtccactggaagagcagtctcaaccactgtgccatctttcagctttccagctctgtatggagtttcttgatccttattcaacaaaatgaagtatcagggacttttaattttttttgttcttctacctattcactctctggtacttgtgtttagagctccaagaagcctgaaggcaaaaactgctctagcagattaactagttatgcaatttttttctaaattttttctaaattagggtgcagaagaaggcagtgacattgctctattcagcttctcctataacttttgctttactctacctaaagtagggtttctgttctcaactacatcccttcttcaggctacagaaaataaacaagagcccaaattcccaaaggatggattgcaagcctgccaggctgaggtcatagatactgtgtttggtgttaatgctcagtaggcacttgtgcctactcctggcatccactgcaagcaagaacttgggaaaatgtttttatagtaaagaaatctgggttgaactgcaaagtagaaacaaaatcgcttttaaaatgttctgaacttcaaaggaattgcccttgcatagaaaggaccttcttgttccagattctcatgtgagcctccagagcaactcttttgaacagagaacttgtgtggagaagtataaacagatttggccatgtgcccagctcggctcagggccacattcctccggtccggacagcattcagcttattattctcctgttaatacctcctcacaactgcaggagctccagtgaaagagagccaggattcgggttcttgctcctcagttcatgaaacaaataatgagaaagaatggagagtcagcaacttgaaaggctatcctggatgagggaaggagtagctgccagagggagaggatctctctacaagttcttagctacgtctgtcctttcatggtacagagttaggagcccatgcacaagcacaaaggcttttttgttttgttatttttgagacagagtaacctctgtgcaacccttggctggcctccaagcagctatcctcctgcctcagcctccgaagtgctgtgattatcccgtgcaccgggacacagtcgcatggcctcactgttccaggtccttcttcttcaccctgcacattcttctttgagtgccctgtctacgctcgagtgtctgtgtgagtcttaggaaagtctggtcaactaatgaggactggcctctggggcaagtgcagcagcgcccaacccagaagcaatgggcttgcgcaccatctctcagttggccagatgtcagggccggggactctaagtccagaggtgcgcaaaggcagtaggctccccgccacgagggcggctggtgcaatcccctgctctcttgcgttgacagcgaaggcaggttgaaattctaaactacgggaggagcaactgatcgcaggatcgggtggtgagcacagccaatggggatgcgagcttctgggtgagacccaatcagtacgtggcctgagacagcggcccaatgaggcgccgactctgcgggctggggcccgccccgtccctgcatccggagacgcgggcagttcgcgtggtctctgctcctgctacttcccccgctgtcgcctcagcaccatggacgccaccaagcaagtggttaactttgggcccgggcctgccaagctgccacactcggtaagatggccagggttccgccggagagccggcatcgggatgcggggcgtcgggatgtggctgttgagatacagacatcggtgtgcgggacgttcggatgccgccatcgagatgtagctgccgaggccaaagtgcgctcctgtgcagagaggccggtgtgactacgactcggcctccccgccgtgtggctcatgcgtgcacctgcgcgcgtgggagagtgaatgaatgggcagtggctggcgggccaggtgcgagcatgtcagtctccgggtggcaggctaaactcggggtgctgggagcacagtcctcggaactcggaaatggaaagctccggcttctccctccgaacccactcagcccccaagcctttctcctgaaaacccacttgtcccctcagtgctcccggggttctgactctgaaaggctttggtcggtttggctaagttccattcgcttgatctgggtgccatcccgtccctcgcgggttcctctcgcaccccagctgtacggaatgagatgcctctcatggcttggagcccatgaaccagctgccgaaacggtatctgataaccggttgccacagagctcgggcatggccaagaattgtacaattatctgttgttgaaccctggcgatctccctgggacaccgcggcctctgtggagtagaaacaggatcttgctgtgtgagaggggaaaggacgtcttgcttttgtggggacagccgcacaagctgagaacaaggcttattctgcggtccttgcagttcatcatccgtgacgttctttgccaaactgtggaaacttctgcaggaaccctctcccactcttttagagtgggctgtgtcgagtcccccgggtttcccccttccccgtatggtaaggcaaggtctgagtgcaagctagcccaagagagaatgtcttagttatggttgcaattgctgtgatgaaacaccatgaccaaaagcatcttgtgagcttggcgttggtggctcactccttaatcccagcactcgggaggcagaggcaggcggatctctgtgagttcgaggccagcctgctctacagagcgagttccaagacaacctccaaagctatacagagaaaacctgtctcgagaaaaaagaaaaaaaagcaacttgtggaggcagtgagggctggagctgatgtagaggccatgcaggggtgctgcttattggtttgatctacatgacttttctcagccttgtttatggaactcaggaccaccagctcaggggcggccccaaaataggctggaccctcccccatcaatcactgattaagaaaatgccctgtaggcttccctacagcctgatcttaaggaggaaatttctcagttgaggctcccttttttcatacaactctgacttgtgacaggttgacataaaattagccagcatacagggattataggtatgagctattaacttcaatttaggaatcttcttgatttagttgaattataaaggttagagaaactttcaaatatttttttgactgtcacccataaagaaaaataaaatttataaaattatgtacatggggctggagagatggctcagcggtctagcttttggctagaagtcttttaaaaaatagtaattttggttataaaatagacatttaatttttgtttttgttttttgagacagggtttctttgtgtagctttggaacctatcctggcactcgctctgtagaccacgctggcctcaaactcacagagatccgcctgccttccaagtgctggggttaaaagcatgctccaccaatgcccagcctgacattttcatttttaaaaattatgtgtatgcatgtgtgtctgtgtatgggtatgattacatgaatagatggtctgaggaggccagaagtgttaaaggctgtcgtgagccaactgatggtggatactggagctcaaattccagtctcctgggagtgcagtttgtgctcataacagctgtgccatctcttcagtcctggttttcaatgtatagatgtgtttttcaagaaagcactagaaaaacacaggaaaaaaaaaatacaggcctggccctgcaatggtggcacacctttaattccagcactcgggaggcagaggcaggtggatctctgtgagtttgagaccagcatggtctgtaagagctagttccaggatagcctccaaagccacagagaaactctgtctcgaaaaaacaacaacaaaacaaaaaaaccaaaacagggctggagaaatggctccgcagtggaggacccaagatgggttcccagcacccactttggttggtgtacaaccacttgtaactccatctccagggtattggatgccttctggcttctaagggtacacacacaaataaaggaacaataaagtaaaaaaaaaaaaaaaaacattaagaatcagttcaaggatgatgtcaggaagttggtaaagggatctggtaaagcagagggcttgcccatcatttgcaaaggcaggtcccttttaatccccagtacatgcacaaaaaccaagattctgttgcagaccagtgtttcttatactatgtgaatgtattcactaaacttttcttatgtttttgactggtgtgatagttgtatttgtgtttatggggcatagtacagtatttcaacatataatttaatgatgtcttcgtatcttttgttctctttaagccagattgccagggtggggtttggaccttctgtcttccactagttaggattacagaactactatctagaccaattcttagctagtatctctttttgtttgtttgagacaaggtctcattatagagccctggttgagttgtaactaattatttagaccagcctggcttcaaattcacagatctgctgggattaaaggcatgcagcaccacacctagccagagcctttctttattagggacattctgtatgatgtccctatgatttggacatgcctgtatgatttggatataactagtttttgttctggttggttcctgaactgagaactttatatgtttaataaatgagttttaagagagaggtgaatgagatttgtagggggacacagtcccttgaatcaatcatgttgcctaatttcaggcccatcttgtgtaagttgtactggtgatgctctgagaaggtgagcgagggggcttggatgtgggtgggtacggaagcctgggcaccttctgggcctctgtttagctgatggttctcacctccctggtgtatgtgaagaggggaagtgtacagggcatcttgaaatcgttctttcttatctttttctaggtattgttagagatacagaaacagctagtagactacaaaggacttggcatcagtgtgcttggtaagatttgcttttggattctgtttactggctcagtttaaaatgtaacaaaaatgactcaagcccaggctttactctgaatggtcttcttataggcagtgataggcatatttaacttaaatgtcctgggttgcatgtttgccggagtcaagcctgaacacagccaagtgctggtgagaagttttgacataaatcactggttccaaattgggttttgggttttaaaggtaaggtttctttgtgtagccctggatgtcctggaactagctctgtaaatcaggctggcctggaagtcacagagatctgcctgcctctgcctctacctctgtctgtgccactacaacccaaccctaattagttttttactgatcacaaaatgtgggattagcggacactatacctttgcataagggtgccaccaaggctctgtaatattacttaatattcaatgtaaagttttttattatacttaaataagaacttgtagaatttaaaaaattcacaagcgtctacgaaggtcttgctcattaataatttctttattaaacttttgctcctgtgttgtttgggaagagaacctccaagttctaaatttcacatttatgtatttatttatttttcttgcatgttccccaggttatgctgtgtgataggactttggggtcagctgtctgagtctagcttgggagaaagagatagagttgggtttgataaggaacaaatgatcagttaacacaagctgtgaccacgcattaagtgtgcatgtgcctaccttctgaactcagagctttccgtcagtttcacaagcatttctgtattttgttgtttctttgcttccacagaaatgagtcacaggtcatcagattttgccaagattattaacaacacagagaatcttgtgagggaattgctgtaagtttttacaagtttttttttttaatatttatttaactttattttatgtacattggtgtaaggatacaagaacccctggtactggagttacagacaggtgtgagctgccatgtgggtgctgggaatagaacccgggtcctctggaagaacagccactgctcttaaccactaagccatctctccagttcccaagtttttttttttttttaattattttattttatgtgtgtgtatgcctcagtatatatatgtatcacatgggagtttgcagaggtcagactaagagtccctattgaggctccctcctttctgatgactctagcttgtgtcaacttgacataaaactagcctggctacttgccatcttattgaactgactgtaggccaaagacaagatacttgcataacacctgttgtccatgctcctgcctccttgctggttccttctatttggtactgatgctggaattctgtcctttcaccgtgtattcctaagctcaggctattataaagcttgggatctctgcagcggggctgatcatcttttccaccctggagtcaaagcattttgcacctagtcctgacttgtgtttgggttttgcttactcagctagacctagagttgtcaaagacagacacctctcaatgatgcctgcctcagtatggttacaggtgatggacctgcttcactgacttaagccaaaatgggaatgtttgccttgtatagccaaaggaggacataggagccctgcctgttgacatcaggggtatcttcctaaaaaggctctgctcacctgtgtgccagctttgtcaggaggccaccagtatttgcaagattagcacctctgtgattagagcaaaaatctcatccagatctcactggcagttttattcactgttcatctcctatgttggggtggccatagttgaaatttggagggttgagaagcagaaaaatatgtttccctcaaagaaagcagggcatttctaaggaaaagggaaaagtcaccataggtttctaccattgtcaccaataaatgtcaaaggaaccagtaaataaatgactaatttgggtaagagagagtgatagtgaaattttactgtagttttcttttaagggatattttgtgtgtgtgtgtgtgtgtgtgtgtgtgtgtgtgtgtgtgtgtgtagctggagatataggccattgtgagtgcctgatatgggtgctgggaactgagcccaagtcctttgcaagggcagtacacgcaattaccactgggccatctttccggcctctgtagagttagaccagaagtatgtacttggtagagcacccctaattctctatctttaatgtgtgagcttatgtgtttactgtcactgtttttatgtccagagatgttcccaacaactacaaggtgatctttgtacaaggaggcgggtctggccaattcagtgctgtccccttaaatctgattggcttgaaagctggaaggtgtgctgactatgtggtgactggaacttggtcagctaaggctgcagaagaagccaagaagtttgggactgtgaatattgtccaccctaaacttggaagttacacaagtgagttttgggaagtgagctggatggtggggtggtgactggccattacccttgctgttctttcgttactgtcctctagtcagtagttcctgatctcatttagatcgtgtaactgtggtgatctactaactactgtagaatgatgacagtcttgcttggctaaaagcccaggagccagtttggtatttggtatggggaagatcagggatgctgcccttgtcctagtaactccttgtcttcttcatagtagacccagaatggtcccttttctagaaagatggttgcagttgctcttcagcttgtttattctctcaagtttcaatgcccttgctggagcatcccaataatagtatcctgttccctgctgtgaatttgtcactaactctgcctgagtcacattttacccctagggatgcgcatttgattgactttgctggaaccacacaggtccagattgcataagcactggggtcctgagcagaatctaatagaccaataggtgtagggtagatgggtttttgatgccaagaaaactttcacatgacctccatctcctttgttggctcatctgtttgggttttttgagacaagctctttatgcgtgcccctggatgccctggtaatcatatttttggttagccatctctccagtccagcttggtagtcttgatgtagcacaggcttgccttgaactcagagcagtgcttctgccttagcctgccaagtgcgggattacaccgtgcaccagaccagtacccttgacccctctgtgctgcacttgaacattacttgtagggtgtgatggatcatcttcagctgttagtggtgatggtggcatgagtaggtggacaggtacttgtacttgccaagtgctttagagtcagtaatcccttcaggaaactcaccaatctcccggtgataccatagatgtgtatatggaaaagtacgcagaacctcaaatttgctctctgtgatagaaattccagacccaagcacctggaacctcaacccggatgcctcctatgtgtacttctgtgcaaacgagactgtgcatggggtggagtttgacttcatacctgatgtcaagggagcagtgctggtctgtgacatgtcctcaaacttcttatccaggccagtggacgtttccaaggtagagtatgaaaggttgggtcagggagccagtgaatgtgaagtgttttgatgtatatgcccgtagacaagacctaagggtgtctggagctagcagagcccctaaagccagggtagacatcggtgagcaggctgacagctgcttatttcatcactagctgtctgaacatccaagtctgtggtaatgattgctcatggcctatatgccagtaatttgcttgcctttaacagtggctctcgagctgggttggtggcacgtgcctttgatcccagcacttgggaggcagaggctggtggctctctgagtttaatgataacctggtttacattttgtgttctaggccagcaataggtatacagtgagaccctgtgtttttgctgttatatttgatagttttttttttcagagtgtgtgtgtggtatacatacatacatacatacatacatacatacatacatacatacattatgcacacacacacgatttacttattattgcctgtgtataaatgcacacttgtcatggtgtacatgtggtttacttgctggaccactttactgacccagttttgaccacttttaggtgtacagctcagtgacattaagcaagttaacattgctgtgcagccttcacatctgtcggaagaacttttagattttgtactagaattttgtagtggttaaattgccacatccccagtctttgccaatcactatccaactttatgaatttgtactcaagggacctcctgtaaatgggatcatgatatttgttctttagtgcttggcttaattcactaatgccttcaaggttcatgctgtggcatttataggaacttcagttttagactagtattcaattatatagatctacaatatttggtttatggccacaccttatgtttttaaagaagggtctcactgcatagctcagcccagcctggtcttgaacttaaaatcctcatgtctttcctttgtgctagaattatatgtttggccattccaaaccatgtcagttgtgaaccgtacacccttacttgattttttggggtgatatagaacttgtatcttctataacaaaatgtcctcaagaaccattagccattggtatattctaaaattctctctcaggtatctcacccactaaggttgtgttgcagtagcccccttcatggcagcttccaactgtctctaagtagaaatttgtattaattacttttgacctaattatttagatttattttacatgtatggatgtctggcttgagtgcatatatgtatatataccagatgtgtgtctggtgctggcagagattagacaagggcattcgattgctgaaactagagttagaaatggttataagatacaatgtgagtcctgggaattgaacccaggacctctgcaatagcaacaagtgctttaaaccactgagccatctctgaagcctattgatttaaaattttatattttaaccatttcaatatttatttaaaaatatgtaactaaatttttgtcatttaaaattaggaaatattagtagttgtacaaataaatcttctaaattaaatgatggtatttcattttgattgcaaaagatttggaggccccagtttctttttgttatttttcaatgtttggtatgaagcccaggcttaatgcatggtaagcatgctatattagtgaactatacctcaatctagagggcctacatagcaggctagttctgaggctcaccatgaagccaagggtgaccttgaactcctgattcttctgtatccatctcccaactgctggggttacagatgtgcaccatgaagcctggatatgtagttaaaacatttttaaagatttatttatttcttactatatgcacattagtattttgccttaatttatgtatatatgtgtaccatgtgtgactgactctgaggtcagaatcaggtgttagatcccctggaactggagttacagatggttgtaagtcaccatgtggatgttgggaaacaaccccaggttccctctctgtaagagcaacaagtgctactattaactgctgagccatctctccagccctgagagggcctgtcataaagactggtttgggagtagaacaagggttgtgagagcatggatgtcccaagactttgcagtgctaggtgtggaaggcttcttcctggaaaaggccagggtctcagcactcaagcactgtagtatgttgtgctcctatgcaggaatgggtaccttgctttaaaaaattgtgctgagagaagagcttattgcataacttagggatggccacagattccctctaaagtagccgatgtttctttcttttttaagtttggtgtgatttttgctggtgctcaaaagaatgttggctctgctggggtgacggtggtgatcgtccgtgatgacctgctgggcttcgcccttagagagtgtccttcggtccttgactacaaagtgcaggctgggaacaactctttgtataacacacctccgtgtttcaggtaactctgggtgctgtagtcttccatcagagtggaggtaaagtagaacatacttcattagccaggaacccaagagccccaaacactcagcattctttgtccagctcacctcttggcctctaggtactgtttggtcagtttttccattgccctttttgtggggatgacaatcttagttgttgcttgatcttgataatccaggctccgactgttgaccattaacccacaagctctctgtagataaagtgccatggcctgtgtctcagacaaacagggaggctttccagatggacagggtcaggttacggcaagggtgccagagttctcttctctctttcttgcagaaaatgctttcacacacaaggaagggaagagtttggacttcacatttggttggaagtttcccctgtgtttttcttttttcttttcttttcttcaagacagggtttgtctgtgtaactttggaggttgtcctggaacttgctctgtagatcatactggccttgaacacacagagatctgcctgcctctgccttttgagtgctgggattgaaggcgtgcatcatcactgcccggcttcctctgtgtttctgttactcccatgatacagaacagtgtctggtatcccccactttccttaggagtagagtgttctgtggttaactcttctgatcacccctaacccttacttctggacctggactaaagatgtttctaagatgcatgttggcccaggggttctatcctgcttacctctgggggttccaggcagtagggaaataccagtggatactagtcaggaaggaaaagctgaagacaaggatggtgaaggtaccactggggaccccataggcagggtttctagaggagcagttgaggtgccaggtttccaaggggaggctttagaagatagaaggttgagacccagtctgatggtgtcacctgcaatcccaggacttggaggtggagtcagcaagattgagactgggctacagagtgagactctgtctcaaaagctaaataatgtgagaaggtaggaggagatggaatgaagattgtcctggagatgtgcccagaggccaactaaagagccagggtgagcagtatgcccttgggtttctttttcgaaggctttaaagaaatgtgatgaacatgttcacatgtggtttgttaatgttccactgaacacccctttggggacagtgggacaacaggccagatgtctggtgggaaatggaaaaggctggacaccagaaagtccacattccagccttctcgataactctcagctggccttgaaaccccaccccccactcccctttagctgttccctgaggctgctgagccagaaacagtagaaaaggggcagtttcttcctcagattggaatagtctctctgagaaagtcagggtggtgaacacttagattgaaactgagcaaatgcgtagaaggtgaaaggtagggaattcccaacccagttgccccccccccccacttcagtttctctactttgtgaatgaggtgaaagaagaaaactctgtactctgtgcttctgtgtgacctgaagtactcaaagttcatagtagtgctttaacattcaaggttagaaatggcccaccgagagccatctcctcatagagaagacaatgtgtgcggccacgggaggcagccagaaccctctccattcctgtcaggtagacagacaaggatgtaggcacgttctgatgatgttctttgttttgtttgtttgctcagagccaaaagattgtgggccctgagaattgtttgactgttctggataaactgggccatgaatggttgcttagtagcctcgggcaggaactgggctggaataaatggctatgatgacattctttttaagccattagtaacagtcaaccttgttagtgggtagaggagaagatatttaacaacccttctaacttcataaaacactccctatttatgcatactgagctgctaagtatagattgtttttatctgcagtgtgaggaaaatatcttttatccaattgtcttatttcagttggtgaaaatacaagatatagccatggtgacttgtgcctgtagtcccagtggtagcatatggcctatgcagaggcccttgagaggagggaggaagcaggaaccctcagggtgtaggagagttgacctcagggaaggctagctgcatgaaggctttcagaagcttctaaaacagtcatgacacctgatccccagcccaggagctcatctgcagcctggagacttttggtgaccctttttatttttgtttttatttattttttatttggtgacctttttaaaactctgcacacagggtatagtttatatcgtaacctctcttagcaaaagttttcccaagtgaactgttaccagggaaacactgtgcctgcctatccacgcacccctcattaatcttccaagactcattccaggacccccaaggagtcccaaattcttcagtggtcagatctctttttaaaaatggtatactgggctggagagattgctcagccgttaaaggctaagctcacaaccaaaaatataaaaatgtcacagtatatagatatacacattctcctgaatgctttaagtcatttctagattacttataataagtaataaaatttaaatgctccaaataatttatgtactacattgagtaagaagtagtgaccaggaaaagatttgtttatactcatcccaaacactgattttgaaatgttgtctgtacaaagttgactgaatctgtggttgccaatgaatttgggatgttgtgccaggttcgaggatcccaaggagtcgacactctgatgcaaaagcaaaaggtttcttttgatttcaagctggccagctaagatcttactgcatggtgggcaaatgagatgccaaccagccaaaaagagaagcttttaaagggcagaccataggttgcaggccacaaatttcagagtttccgtggttacataaggtcatacaaagtacagggtaaagcagtaactatatattttaagtgagatatatttgagtgagataagacaggacatgggcttgtagggttccagggtcacagggtctgtcaattaccccctggagtgggggggatctttatgaccagcaattagcaaaggcatgttaactggagtggtggacagttacctctccttctctgagagcagggattaggcaccaaccatggcactcctgatttaaggagttaaatttttttcctttaccgttagatgttcccttttcagggcctaggtttttaatcttttattaattttaatttttggctcctcatggggaagactatcatgtatttatttgtgtcagtgaactgtgaacagtgctgttcagacctgtgtaaatcccccattcaaccgagcagtgtacggtgggcattctatcgtgttaggttaaatgcctgcccccctttcacctttcttttcatagctgcacgctattccagagaacaggcttgctgtggtttaagcagttcagaaaggctttgattgtaagcctgtctggtgtgtttgtaggtatccagtttagaactaaaggcatcggtcactaaaagtgtgcactaatggtaggaagaattgagcccaagttgtgtatccacacagcattgtaaggctcctatggcttcaagagttttggctttagaggcagaggtatgagttagtaagaaggtgggagcccagaagaccttgtgagaaccagtaccaggagcctgcggtgtataccagggagctgggtgggaaagcaggcaatttctctccccacggctgtcttgctttccaggcagcctgctttcttcagttccacctgctgcctgctgaggcgttggagacccagactgaaggggctgctgctggtggtctgcagaagtgtgttggctttctgctgctttggcctgctcagatcctaagaagacagccaaagagtatgggtagcaagcctgacacaggctccaatgttggtcctgaggtctggccgagataggggcccttgttgctttggatttcttagagaatccacagtttctctaaatacagggatactggagcatcaggtgaaagtgaccatagtttactgaaagtattagtcaggactctggctctggtagcctggtgggatgtttctgtggttcatgagtgaggaggctgtggatgctgcagaggagcggtttgtggttacatagattttttttttaatgattctttttttttaattagatagaaaattattttacatgtcaatcccaggtccctttcccttccctcctccctggttacatagattttgagagcatctttagccacacaggggcacatacacacatgacacacatgcacagggggccgttgtgacaggtttggtagcagtccttctgtcccacaggtaagctggtgattgaggcctatagatagtctcagacaaaactgtcccacaggtaagctggtgattgaggcctatgttctcagacaaaacaggtactaggggaaagcactttggctttgaagtcaggcagacactagggtagaatcttggcttttagaattgggatggatggctttagctaagtcaagctctgggtctgttttactgtctgtaaaatgtcttggatcagtctgctgtgatctgtaacaacagactgaggcactatagacttctctaaggctcattcccctttcctccccactcatccctctcccctgcttcctctatccagcaactcaagactgtcttctgtatctcctcccttcctccatcactggagtactaggccagggaagcctctggagaagttctagtctgcttttgcatgcctagggtaacatgttagtgaacaggaagcagcctggctggggcgtccctatcccaggtttttggtcagcatccctttcccaaccgaccttttgcagttcctatagatcacctttatcccacacctggacacagtcacactccggaggaaatggagctggaagctgaccacctgcagattccaagctcaaggagggcaggaggcctgcttctgccctatgggctttcagtaacatgtgtgggacctttttaaaggcagccagaagattgatggggaaaccactccctagcctcaaattccttgtgatttcagcttagtttgggtacctaccagtgaacatttgtgtgggctactcttgccaggccctggctaagcataggttttgcgggagataagaggttagaacacttgtctctgaaaaggatgatcctgtgttgtggctggacctcctagaaccaggaacacacatcttacaccatcacgtttttcatttgttttgagaatagaggcttgctatgtagttcaggttggcttggaattctctgtgtagcccaggctaaaccatcctcctgcctcagtctcccacgtgctgaagtttacaggaaggttgctctccatttctgatccttgcttctctagccagagtgttggcatctctgtttagctagaaacaagatccgataggactcaccttctgcttggaatgggctagtctagttctgcctttccccactgccagctaagaacatcccagggaagttgctgattggtctggttaagtctcatgcccaccttgagaccaaggaagcaaatcttgctgctggacctgcatgttggatgtgggggttcagctgagaagaacaagagagatgtccacctcaggtagtgatgactccttcttcccagtggtaaaggcaaggcttacattttcatggtgactagtcctgtgtggaacccgtggtgtctgccactgccacactgccacattgccacactgcctctgccaggtaggaggtgctggcttggggctctaggatagaaaagaagaacagtgtggtgatgttctgtgatcttctgtgtatgtttgtcttattggttgatgaataaaacactgattggtcaagcaggatgataggtaggactaggagacaatgataattctgggaagtgtaggcagagaggagtctcatgtgatcccagaaagtgacatagctgggcagaatcagaatataagcagggataaacaggaaatcatcctcttctctgtggagatgtagcaggcaaaggaattgcagatccagcattcctggtaagccaagaccacatggaaagacttagattgatagaaatgagttaatttagatagagctagacaataagaaatgatagtcaccggccaatagcgttaaactaatatagcatatgtgtgttttctttggggctgagaagggcggcaggacctagctgggccaagacacatcatgttccagtgtgggcttccagtcttttggcattggaatctaaggcatagacatgcccacagaggtttaaaataaaggaagacaaaagcaaaagcaacccccacaatcttagatggatcatatgaacaagggactctggggattcaggaggtgaagagttagcttaggacggggttgtggagacagtccaaagcagtggctctcaactttcccaaatctctgaccctttaatacagttagttcctcatgttgtggtgcgccaccctcccccccccagcaataaagttatttcattgctacttcataactgtaattttctactattgtaaatcataatgtaaatatttgtgttttgtgtttagtgatggtcttaggcaaccccttgaaaggttcattcaagactcaacctgcaggttgagaaccactggtctaaagagttgaggatctgtggtctgggtgtcatggagcactgcagcagggcctagggggactggtgtggcattactaaggtgcactctattgagctacagttgtgttggcctagtccttggtgtgcacttcaagtggtgtgcttttatccatttgtaatgatgctaaaagtgtcagtgtgactcccattaccagtttgcttacatgtccttttgacttctgcagaggtgaactcattgctattgtattttatccctgctttagcatctacgtcatgggcatggtcctggaatggatcaagaacaatggtggagccacagccatggagaagctcagcttcgtcaaatcccaaatgatttatgagattattgataattctcaaggattttatgtgtaagtcaatgtattgtatctcttgtgaatcggacactttattccctgaaacttaccttttcctaggacactagcataccggtgagtgatggtagctcccgtgcctcatgagctggggttggaggtaggacaattctttgcttttgggaaatccctgtcttttgggtcatgtcaccaagtactctgacctggggaagtatgccttgctgtctggggtaggaaccctctctactccctcctcttttgtgtccctggaaaacagttgcaggaagccaacagctttgcctaaagctttctgttaagtccctcatgctgtaaatcccaactcctgattccctccccccaccccccatgggcttctgtgtagccatctatggacaatttgcttgtataggtcagaggacaaccatcttgtcagtcctcatattctatcttgtgtgaaacagggtttctttgtttttcatagtttcatttgccaggctaacagtcccttgaacttcaggggttctcctcccatcttatattagaagcactgggattgcagatgcattctgggattacaaatacattctaccccatcaggctttatgagggctctgggaatttgaattcaggtcctcatatattataaacattttgttcactatctccccatcccttcttccccttttatcaaagtttacttcctcctttattctaggacaggtgttcctatccctggtctgtagtctgaatgagtttggctatagcagggttgacttttatctagttatatactttcatgacaaagtgacaggggagcatctgttgctcactggctgtgtttgtgaggtctacagatcttgaaggtgtttcctggggctgctgtaataaagcacccatggacttggcagcgaataacaagtctcttttcctttcttgtttttctcttttatgggagtgagccagtggatttaggtattcccagtacttcaggatgattttgttgttgttttgagacatgcttgcgctatgtatcccaggctggccttaaactttctatgtagcttagactggccttggatttgtaccgctttcttcctttcccaagggctggtattgtagccaggggatgacacacctgcctgtgcatagtagccccatgtcggtgatctttatcatcattttgtctgcaaaagacaagttttccaaataggtcagatttctggatgatgagagatggattctggatgatgagagatggatgtgtccactacccaacctgccacacaggcttctctccataatggcagataggatgcccctaaggtagtgcctgggacttagaaacattttggacagtaatggcatttgattttccttagctctcaaggtgggcacagatgtacattggccatatatcttatggtatgtgaatgtgttgtttatatacccaattccacccaattccatgtatgtacataaacattcataatcactgatcaagccatcatctccatttttaatagtcatgattctttgaggcttagtctgttgtaagagatttatctgcctaacagtaacttgcacttcctttgagtactttgtggaccacatgaaatagaaaagagtgatgctgcaatcctaacttacttgctgaatttgtgtgggtgaagggtgaggatgcattcttggataactaggctaataaaacatgttgccatcccctttcccctaaaattcttgtgtctgtttgtgggagctcttgcagcagccatctcaccacaagctgggattaaggaggtataccatcaagcctggctttccatgggttccagggatcgatctgaattcaagtctttgtgcttgcatagcacgcagttggctgagttagccatctccccatgccccattgctatttttctgaaacacaaatctcttactgggcaaactctctagccctcattcagggatccagccaaatgccaggagagtgtcagtaggctctctatggaccaggcctgtgtgcctccagcctcccctgccaggaaggagcacaacatgctgactgagccagacagagtgtggtagctacttcctccatacccacagtcctctcctttccctcttcctcctctgtcctccattccctccttccacacgtcccctccttgacacctcacagaaagagtacctgtttggaactctgtctccacagccctccccagctaactgccctcctcacttggaagtatcatttccatctgccatctttccctcagttggaaatgactgattccccctcttttcttctctttcgtatatgagggacttgctgttatgggtgatgtgtgacatattcatttcctggagatttaatctttagtttcgagcttttatgacatgattggtttgtgttattttttccttttctgaaggggtggataatttgggggcatgagctgcaagtccagatctttgagtcttaagtcttcggccacctgtaggcccagcttgtctgcagccttgctgagaaagatgtacactaggatggcatgtgttggaagccatgtaaatgacccactgaattgtcagatcgtgggaaattgggaaacagacattgcggttcctaatattcaagtgaagggctgactctgacagaaattagatagaagtcatacaagcgaatgctaacttatatgagtgaggcttttttgtcataatgttctgggaaggtttttttttttttttcttttcattttaatttcttgttgtgggtcttttaactcatccatttgttgtttatttttgagacagggtctcaaaatctggccttgaaatcactatgtggccatatggatgaccctgatcactgatcctcatggctctacttcctgattgcttatgcctccagaacctagaaccttctacatgttgagtactctgtcagctgaatgccagccccagccctgatactgtttagaaacctgtagatttatttatgacattacacccgctagaaacattgctggactaataaataataaacatgcttttcaggtgtccagtggaacgccagaatagaagcaggatgaatattccatttcgcattggcaatgccaaaggagacgaagctttagaaaagcgctttcttgataaggcggtggaactcaatatgatctccttgaagggacacaggtaagcacaagtcatccccagactcatgtcagaggcagaatgaaacaaacccaagaccttgcacagctgggagtagcagtaacagacttgctggggaataaacccacttatggctgggttgtaacatatctcgcattgggttgggtcagctctgaaagtgcctctgatagggcctgcctgctccactccggtgttagaccatcattgggctcagctgcacatccgataccctgaacaacaaacgtcctcacacaggagacctgcaacagcacagctcttagtctgtctagttggaactgttgcaaagactagcgagtggcatggtcccaaacccagtcacctcttcagctggctttattccccctcccttatttagtttcttctttgtgaacagtttgagtatgattaaagtctagtgtatgcgcgtatggaaatatcagactgaaacccattaatttgtataaatattgttaataattactctaaaaatgtgactagtttgaggtaatccagtgtgagcatggtggatgaccttcactgcacaagggatttccataatgactcagaagcttcatgctgcggattggggatggtttgtaggagggaagttgagtgctctgggctcaggtgctactcttcggaggggtgattagtgaaagttgtgctgtgttgaaatagatgacttttgaatttcactttttttctgtgtcgttgaggttatggcctgagccgtatgtatggtaggcaagggctttaacactgatgatatgccttctcttcctgattttcttggtcttcatggttgggtctctgttgttctaggtcagtgggaggcatccgtgcttctctgtataatgctgtcacaactgaagacgttgagaagctggctgccttcatgaagaattttttggagatgcatcagctgtgaacatgactagctatgctctgcctgtgagcagcacgcagagttcagaataacttctggttggctacaaaaacttaacagacatggattttttttcccccaaacacatgcttgttacagattctttttgaaagaataatgactaaacatccagggctctgcagggctgatgagactaccagcttatgaccaccttcattttgacttgacctggaagcagtttcaaagctttcctgttgcttttctaatgaatccagcctggcatgtctctgcccctgtctctaggtggattgcagtcctagccttggactttgttctgctgattccatttagttattttttgggttcacaggagcataccccaaggaggttggggtaccatgttctggatctgacagcagtgagtttgctgggttctgcagctattggttaaagtcaacagtgactcttaagcattttggatctgtatactgttgttctcacaaagagataaaagtgacatacgatactagtgattatatagtgggtatgtttttaacaccatacggtttatatctatgcctttatatttctaatgaaacagttctgtagatgcttttagagtttgttcaacccatgactttgtgcatgactgtcctctgctgtggacagttgcaccctcccacctattcccttctaaagctgcttcatcagaaagatctagaagtcccatgattcacttttcctatccttgccacaagtagaagaaatggttctttgtttctcagttagactattaaacaaaactcagttgcccttcaacccccgtgaaatgtgttcacatggctgtttttgtagtttgaccagggcaatactgtacattccagatttttgctgaggtctttctccatccttcatatgttgttagtgttttctgttgactgtgtgaagaacattaaagtcctaaagcatctaaaccattgcctgtgaattcttctgcttgcccttttaggcattctgacaggaagcccagggtctaagagtaacctgtgatagagagtttagtccagacaaaggtatcaggcttagttcttgagcaactccatgtggttgcttaccttttccttttggaacagacacggtcagcagattcccttccagcactgctcccagtgtgcacttctgtgaactctgcccctgttagtccagaaaaaagccagcagaacagttttgagctcttcctgtttcatttgattacacaaagagaagacactgattaattggttctcctggtcaggcttcacctcgcttgtgaaagggtggagataaaacccagcattgcaggatgcttgtattaaaaacgaggtcttgtttcagggtgtgacaaaccatcactgtagtctctgtaaatgccaagagccagcctgtggaatcaactgtgggtccacaaacaacagtgctcagagctaacgaacctcccccctcccttttcccatgtgtttgtgaatacccattgtctccacttcagtccttcctgtcacagccagtcctgctgtgacaaccctgtcacagcacctgtctctgccccatccactcctcccagcacagccactagcactgactttctgtgtgtgcatgaatgatcaaggctttgtagtgtggcagtcagagctccctagcatctgcctggcttcctgtcccctgtgccaatgactcttagagcctttctgttacgactttgcccatgttcctgcccaactcagtaagaccaggctttcttcatgacatcagctgcctctttaatttctctttctgttactttctttgttgtcgtggaggtggccattttatctctcctctttgtgatgctgaggtggctgcctgtctgtcttgcatgtagatgttcagactgcctaatgagcaaagagcacagtgcatggtttcttagtgttgcaaacagcttggtgcagtaaaggcagaatgcaatctcagcacatggattttgtaaaatatcaaaagtttagtgtacaatgcaattcattttctaccaatggtttgactaggatcctatggtcgagtggggaaatttaagactcccaagaggtttctagaattatctttaccatttggaagcttggagggagccagttgtctggccatgctagactttggagcacagatcttagaaaataaccagagcataaaatgtgacctttgtgtgccacaggagatgagctgatgcccgtctgctcatcccctggagggtggtgggagggaatgctgggatgcaagggctctggagtctttgggataggaggcttctggcctgtcactggaggttaggaacaaggcaacaggggagattttggggccccatgagtctgggtgaaggactgactcatgtttttggcatcttctaaactgcttcttgaagtttatttttctctttcaaagttctttatgacacataacatgtcctgatagcatcccaatgctgaaaaaccttcgtgtattctgtttaattagcattaaatgagtcatttttttaaaatcaaatctataaaacatgtgatgataacaaggaattaaaatcttttcatgtccccacctcataagacttttatgaaaatctttcaatcccccatggccacccagtaaaacctttgtttacagaaaagcccagcttcatcctctgcttaaagtggctggcccctccccctttactttgtgtacactgattctttacagactggccaactgaataagattgaataaggttcaaccccagcctaagattgaataaggttcaaccccagccaatgaggaaaagacacaatacccagggctggagagatggctcagccagaaagagcactggctgctctgccagaggacctgggttcaagtcccaatacccacatggcagctcaccactgtctgtaactccagttccaggggatcccaataccctcacacagacatacatgcaggcaaaacaccaatgcaacataaaataaaaataagtaaatctatagaaaaaaattaaaaccaagtgtacatcctctgtgtgcttggcctttgagtataccctcttggtaagtatcacgcctgatctagctacttcacttatgctctactcactgctttgtctccaataccgtggttctgttctttgcacaggagagaattgagatctgttcccaactcctcatccccctgctagattcctgcccattgggagacatacccagaatcttgtcatggctgtggcccctgggggctggaaggcttggaatgctcttgggtgagctatctgagggagtgatttttctttagtgctgaaatagccactaagaccatataaaaagacaagcaccattgacagatgacatggccactggcattgaagggtctggcctcacaccactgggattaatgttgtatcctgttcctgggaaggaaaataaaatgaagtttctcacatttgatcggaatgaacataattaaaaagtgccatgctactcatttgctaagaaatcaatcattttaattggaaaggagattccttaattctcttactgggctcctggtaatttaaaattaggatccctgacagtttgtgataaattgtctccttttgggcagaagaggtaagaaattctaattacctctggattattccagagtggacagaaaattgtgatcaaagagatgttggagagaaagggtggctgacagtgggaaaagatttgctgaaaaccttttaaaggacaaactcatttgatgtggcagaaacgggagcttgtgtatttaagatcccagagatataaatcagattttctaagaatatagggaactaagcatattaggaaaagtttacacacagaaagtgctctaggataacagaaattagccctgtttactaactagtcttggacctcacttggggaagaatatgaaatttacaggctggtgaaatggatcactgagtaaaggtgctttcgagacgcctgacagacaacctgtggttgacaactggacctctgtggaaggagagacctgagtcccgaaagttgtccatatatgcgctcccttcccctcagacaaattagcaaatataaaaaatgtcttgcaatgtgaggcttatgtttctatgttaatattctacacaagtttaaggaaagctaaaatgttttattcaaaggaaagaaaaattaagttaccagaattaaggacagaattgaagtggtaaaactcaaaagagtattaactgtagatcatttatacattaatgtttgattccactgtgctgcagtgtccaaaggagagagggactccctcaggtcgtacacacacacatacacccataccccacccaccaaatagatataaaaaacaataattggggctattgaatccattggccccacctgtgtcgctgtcctaacctttgtttctaacttgcctaagaacacctgaagaataggctgtttagactgatacagtgggctatatgtatttgaaatatgtataattaaaattttaaattaatttatcatctgtagtatcttttgcaaggtatgcattgaaacagcatcatgtatatttctatagacagcttatgggaaattgactagattggctgaagaactgcttcacccagaaccacctcactacaccaaaaccaccacgcttcacccagaatcactttgcttcacccagagtcacattgctgacagcttcagggatttaggaatctgcttttgcatactcacatacacatgctttctgaactgttagggctgatatcctagtttgctatttattgctgtgataaaacacaagcaatttggggaggaaaaggttaatttcagctcatgtgtcctgaccgaagtctaccatgaaggaaagttaaggcaggcactcaaggcagcaacctggaggcaggagcaggggagtgctgctcactggcttgctctccataacttgcttagcctgctttctcaaaccacccaggaccacctgctcaggggtggccccccctatggcggccatattgatcactaatcaagaaaatgcaccacatgcttgcctatagtccaatctgagggacgaattttctcaattgaggttccttcttcccagatgacctcagcttgtatcaagttgttgattaaaaaacaaaaacaaaaacaaataaaaaaaattagccagaagtgggggcagtgggaggagaggagggagggagaactgggattggaatgtaaaaatttaattaaaaaatgttaaaaaacaaacaaactaactaaccagaaccagtaagtgggagtcagtgtgtcttttcatgcctatatggtgcttatttgtaagaacaaggattttatcttacagcacagttattatttttacatctatttgatgtgtatgtatcaggacaacctgagggggtgggtctctcctttggacactttagcacagtggaatcagacattaacatataaatgatctacacttaatatcaaattttaccactcattcccttatgggtattttttttttcagtccagtgtttacatcctgctgtcacacttaattgtcgtctagatatgaactagttcttcaacctcttttttatgttcttgacaggctggaaaaatttgaaggcttgttgtggagtagaatttgacttattcacatatgtctccttgtggcttctttctttaaaatacatttacttgtaggtatgagtgtttgcttgtatcaatgtctgtgcaccacacccacacaagtgtgccttgtccatgcggaggcggaagagagtactggatggcttggaactggacttacacttgtgatctaccttgagggtgctgggaattctgtaagaacagcaagtgggctgctaaccactgggctgccatctctctagctcctccatgtggcttcctcgggttgtgtgttttggcatgcccgggcagcttgtcctgatctccataccacacagatacacaaaacaaatagatctaaaaattgaaggaaccggcttcccttttggcagccataacagccgaacacatgtttctatgaccttgacctagacactagaaagtcagatgcctgcctcgtgacagggagccaatcagaggttagctggtggcgctatgctttacgaccctgggtgtgctttacggacaagcgcacagcaatgacgtagagagcatagcaaccaccctgggagggcctatgggccataacaaccagttgaccaatcaacacagggcaagccctccaagcctggaagcacaccaatcgtgagcctgtgcgtaagcctgtgcgtacccctagacactccccttacgctgccctataagatcttttgggagacccaaggagccgtcttttctagccgtccgccatggcgggtgggtgaaagacccgagctaacatggggttagctcgttaaattacaataaagcctcgtgcagtttgcagcaagctctcgaatccgcctggtgattggggtgaccgagaatgtggcctgggaccccggaaacttgagttttcgggggtctaacacaaatagatctaaaaataataatagtgtcacagaaatgaggctgtgtcctcagcaggaggactcatgatgctggtgtctcagacttccctgatgtcagcttactacttggccctttgagaccagtaagttattgatagggaggtattttaagactaaattcccttttcttcattgaataagtgaaaagttccatggaaagaaaataaaatctaaggaggcaaagtgatatactgtttatgtttacctccttcccattacaacacttgaaactgtaagtcgaagtatgtaaaagtacattttggaagccccgtaccagcagttagaagatttatagtgcataggccctgaaaatagacttgagatgataaagcctgtgtgttctcgcttaggttgggaacgtatcctgtctcattcccaacgcagtggtgggagataggactctgcaaagtgactgtgtcgtgagaactgtgatcctgtcaatggatggtccacatctggattgactgcatgggccactgtctccagggcccatcctgctctgcctctcacattgtttctacctgaggcagtagatctcttcttcaccacaggcatagaaacaatggcgataagtgaccacagactacagactctgaaatccagagccccaaactccagaagactgaagccagaagacccttcccctaagctatgttgtcacagtgatgaactgcttggagcaagtgtgcttttgttgaaccaggaaaagaattctctgctcaagattggggatttaactttccttttatctagtcaagcttattatatctcactatttttaagagtgcagccctccagcaatatggggctttaatttaatagccagatcatgagccacacagccttgttaggctttgaaagatgtcatgtaataaccaaaggttaaagtcagtgccaataactgttgctctgcagaattgtccccaagaggaggataaaaccgtggcctacattgagccaggtaaaaggttgaaggcatcttaaatgtctgagagatgagactcagttgaattgtaagaaatgtaaaagtaaggctggggatgcaacacagttcctagcaccatataaacctgtgtgaggtagagacaggagaatccaaagttccggtcatcctcagctatatagtgagtttgagctagcctgtgctacatgagacactcttaaaaaacaagttatagtttagaatgggaattatcttgtccaggagtgtaaaaggcagccagaggaggaatgtttctttctgttgcttcttccttgagtgaaaaccatagtatcctgagggtgaaagtccttgactgaagtagaaattttcaggagttattgggaagtgacatgtgacctaagggtagttggtaacaccccaaataacaaacctgctctaaagtgtgctggggagagaaacttttgcatttggggtgcatttcaatctagaacaatttaaagaatacaggttcaaatgaaagctctggctcttacccactcagcaccacctcctctccatttccccagcagcccattatatagcagccagtgccattcacggcattcagtgccatccatgaacaagattctggtgggtacagccagttatgagcacaaggtcaaggttttgaatcagttaagattttcttagttacaatacatagaatatttgatgaaaactggataaaacatcaaactatgaataaatgacaacaaataagaaataaatggttaatagaaccagaagcctccaggcatagccagccagcatttcctgggagcttgccttccttactcatcattcatttcatgatccccacatggcagcagcatttcagacattgtcattgtatgaagactgctcatgggagaacacgtccaccttggccttccctgatgtgcattctgactgggctatcttagctcagggtctcacccctgagccaactggaggaaagaataggacaattggctaaaacaagtccagcttctgttggtgctgaacagcaaggccaacctcagctggggtggtttgaacaaaattggcccccatacagagaagcactatttggaggtgtgaccttgctggagtaggtgtggctttggtagagaaagtgtgtcactagggagtgggttttgaggtctcagaagctcaaacctggccagtctatcacttttcctgctgcctatggatccagatgtagaacgttcagctccttctccagtaccatgtctgtctgcacactgccatgctttctgccatgacgataatggaccaaacctctgaactaagccagacccaattaaacattttcctttataagcattgccatggtcacgatgcctctccatggcaataaaacccaaactaagacaccagttaagccttatggaaacctggtagtttgtcaaaatatcctgattttgagttagatgtggtggtgcataactttaatcctagtgctccagaggctgagactggaggatctcaagtttgatgccagcctggaatacatagtgagaccctgtctcaagcaacaactaattctgacttttaaacatgtagttgctatattttattttataaacaataccgattaatatacttaaaaaagatttatttttacgagtatgaaagtttgcttatatgtatgtctgtgcacttatacacgtctggtaccaacagagatcagaactgggcatcagatcccctggaaccagagttacaaacaattgtgagcagccatgtgtgtgctacgggaatcaaaccaggcttctctggaatagcagtcaatgctcttaacctctgagctatctctccagtaccctacatgcctactttaagcccatagcttatcattcttatttgtattgctttacaagttatagcacaaaatttttccattaaggattggggccaggcatggtggtgtgtcccgacctgcaggacatcaacctggggcaagagagtcagggataaggaatggggacaagagacgcagaaagaacgaccacaagacaggattctgatcaagtagcaaactttacttttctcaggctagcttatatagtcaggatatggggaggggtagaatgggttgtttgtgagccaggtgttagtataggcaggctattaggaagccacaaagaggatgtttggcagggtaaagagttcatgagtaagaggtccaggaagggttgcttaggtgactgagcctgtgggtggaggtctgggtcaggttgtttcttttcttgagctgaggttctaaggagctctgatgtaaaggttaaaatacaactatgtggccggccaagcatggcctacggtctcatgcccagccctgagatttggctcccaacagtgttgctcacctttaagccccacactcaggaggcagaggtaacctggtctacataagaccagccagtgctatatagcaaaagtctgtctcacagtatacaaacaaacaaacatgagtagggggaaggattctattctgatatatttacatcagtttctctgtgctttatttatttataatttaaaaaagaatggcagtctgttttttccatctgtggtaaaatactagggcaacatctcttcaaaataaagtttatcacatatgtcagtttcccaattaaaaatgcccccccccagttgctcctaaatgaaaaaatttcaatgtaacttatatggaaaagaattggtagttgttgttttaagcaattaccaaagcagtttacattgctcctaaaaacagaaactttggaagaaccagaaatgctttacaaaggtttaattggtttagaaaaggtatattggcaggatcttttgttcgttattttattttgtaaacattctagaaaatttgctaccaccactgtttctgttgcagagatggcatcagtaaccactgaattgaggataatattgtccaaaagcaagccagcctgaccccaacagttaaccatacagtggcactatacatttcttcatgcagccttgtgtttcttacacacacacatctctcacttgcactgcagtacataggtatgtattccaactcttttttattgtttatattttgaggtagggtctctattagtcctggccatccgggaactccctgtgtagactaggttggcctggaactcacagagatccacctgcttctaccttctgagtgctgggattaaaggcggaaacccttctgccattgcttcagtgccttcatctcctctaactgtgccatcagccatctcttcctccatttcaacaggttctgatttcgagttggcaacgatttaatgaggacacctgacatttctagaatctttgtttttcttggcctcattttttcagtggtgtttcctacaatggaggtgagttttctgtttgttctccctgtccaaaactctgagtagggcaggttggtcactgagttcatttgccccacaaagggatcatcttctgttttctgcttcctgacttcaagggcttgaatagcatctaccatctggagagactgctgctttccatacgccattggtggctgcttcttgtcaccatgaattttgatgtatatgtggctcaattaaggacaaattgccactttactgacagtctatctcaattaaaggtactttttaaaaaaagagtatttttattcttgttttatgtgtgtttttgcctgtatgtgtgtatgtctgtatcacatgcatacagtgctggtggatccatgggaactggagttgtgatcttccatgtgggtgctgggaatcaaagcccgatcctctggaagagcagccaatatgcatgactattaaaccatctctccagaccctcagcagaaggttcttgactaaactcccaaaggaatttgtagaacttgttgaaagcaactaaaacagcctgccagcccttaaaatgatatctgttgacaaactgtttactgtgatgtcagtaaaccgatcctgctcccagtgttcattaggttcaggatctctttccttttggtgcttatgaaactcccgaaggcattccatctttctttcagcctccgctgatggtgggggttgatgtgctgcatccctgtgctgggttctagatgatgtggaggaacccacagggcccctgcctctggtagagggtagaggaggctgactggctatgttgggactcagagcctctagcaccatgtccactgtgcattcaccctgacctggcccaggtgctgtactccagaccataaacatcaaatctctgttaatgtatttttaaatttttatttgatgacatggtcttgctataggtctcaagctagcccagaactcatggtcttcctaactttgccaccccaactcctaggattacaggtgtatgccaattttctattttctgttgcgcgcatgtggtctacagcctagctctgtggttctcaacctgtgggtcctgaccactttggggggtcaaatgatcctttctttggggacacatatcagacatcctgcatatcagatatttacattataattcgaaacagtagcaaaatcacagctatgaagtagcaatgaaataattttatggtggacagtcaccacgacacgaggaactggattgaagggtcacagcatttggaaggttgagaagctttagcccaggtggagagttagacaaagaatgactaaacaggtggttgcaatatgtgaaagaacactcaactgtaaaagggtgtccagaggaggatgttagagctgacattgaatcgagagctgaatgtaggacaggaattaatgaagaggaaggactgaggcagaggagaaagggatgccaagagtgggaaagggagaaaagtggatgtctttgggaggacagctgtcatttgactttttattgggagagttagtatttaactcttctggtaccctgcagggacagcaggttctacaagtggccacaggagggcacccaggaaagacagcccatagcaggtttccactgcatgaggaagtcagatgagccctgagcatttgctgattggagagcctgagatactctttcctgtgggatctgaggccatcatggcctggtttggacagtgaccactgcccatggagggcagaagtagagaaatctgtagaccatcagcaccagcaaacaacctgctggatgtcagcccagtgcactacactcgttatatcttttcattctctaccactgccaacctctgtaagtgacattcagtaaatgttgactaatgtagatcacagtattgatagacatggaaaaataatacacagttatgattaattaataggtatttcctccctcacattttcttcgtggggatataactcagtggtagagcacttgcatagcatgtatgaagtgtttggttcaatccctacacacacacacacacacacacacacacacacacacacacaatacatctttatatatataaagatgtatagtaaattagccagtgcctccctggatttccttgagcttttagggtattgtttctctagagatttgtggagttgaatgaacatctaactgaggtgttcagggtgaagaaatctcagcctggagctatgttcattccactgtagaatggcatcctggttgtgtttggttgggatgatttaatacttattattaaataaatggtttcattaagaggtcatggtgggagccgggcggtggtggctcatgcctttaatctcagtgctcgggagcagaggcaggtggatctctgtgagttcgaggccaacctggtctacaaagctacacagagaaaccctgtctcaaaaacaaaaacaaaacaaacaaacaaacaaaaaccaaagaggacatggtgggaagcactgtcacttcgatgcctgtcttttcttgagggaagaagaaatgtgggcctccagagtgaaaacaaatatcttatatgccactgagcttattaacactacaaataaaaatgtatgtggtggtttggataaaaaatggcccccttaggttcatgtatttgaattcttagtcaccagggagtagcactattgagtaagattagaaggtgtggccttggtggaggaagtgtgtccttgggggtgggctttgaggtttcaaaatctcatgccaggtccagtctttccctctcttggcctgtggattaggatgtagctctccgccactgctccagcaccatgtgtgccagcatgctctacaccttgatggtaatggactaaacctctgcaagtgtaagcaagctcccaaagaagagctttcttttgtaggagttgtcttggtcctgatgtctctttgtagcaatagaacagtgactaagacattgtacaaagagcactgtttcagcttgtggtcagacataagtcataagaatttacttcagagggcctgagttcgagtcctagcacccacatcagtggctcacaactgcttgtaaatcctcctccaggggatctgcatgagcatgagggcttccatgagcactgcacgtatgtgcacacacagagacatgttgtggaatattagtttaagatgagttacattcatttgtgctgtggaatatttgtctaatgctacaaagatgtgctgccttcttttatgatgtatttgtttaactctctaaagctgtgttcctttgcctgtctgcaacacctgattggtctaataatgaaatgaatggccaaaagctaggcaggggagagggacgtggggggccagcaggcagagagaataaatagaagaagtctaggctcaggggaagaaagagcaaggagtgagaaaaggagaaggagggaaggatggtagggaccagccaccctgccatgcagtcagccacggagtaagaaagaaagaaagagatatagaatagaaaaaggcaaaaatcctagcggtaaaatgtagttagagggaaatgggataatttaagttataaaagctggctagcaacaagacaggctatggttaggcatttataagtaagaataagtcgaagtatatttatttgggagctgggtgggaggccctcaaagggttaaaaaaacaactacagagacaaacatgcaaatacatagttaaaaacaaatctttaaaaactaaggaccttttcaaatgtaaataatccaggaatttccttaagctatctgatcagaacagctgtgtcagagacagtgcaagaaagaagaaagaagacattttgtaaaatgtggtcctgataaaaataaaacctattgttttattcggcctccttgaaacaggctactttctgagggaaatctatgagctgctttgagcatggcgttgccaaggccaagttctaacctgttttgccaaggctaaagatacaccttagaagaggttgcggggatctcacctaagaatccggattctaaagccgggcgttggtggcggcatgcctttaatgccagcactcaggaggcagaggcaggtggatctctgtgagtttgagtccagcctggtctccagagcgagtgccaggataagctccaaagctacacagagaaaccctgtcttgaaaaaaaaaaaaaaaagaaaagaatacatacggattctactttaaaactgaagcagtgactggcaatgtaggtgttggtacagtacttgcttaccacacatgaatatctggcggtgactggcagtgtaggtgttggtacagtgctgcttaccacacatgaatatctgagagtgacggtacacacttgaaatcccagcaccgggaatgtgcagacaaatatcagaagtttagggttggagaggtggctcagaggttaagagccctggctgctcttccagaggtcctgagttaaattcccagcaaccacacagtggctcacagccatgtgtaatgagatctgatgccctcttctgcctgcagatatacatggaggccaaatgtcgtatacacaataaataaataaaatcttaaagaaaaaaaagaagtatcagaagtttaaggtcatcctcagctgcctagcaagtttcaggccagcctgggaaatgtgacatcctgtcttaaaaataacccctccccccaaaaagggcacaaaggctgggaatataattcagtggttgagtgcctaccccacatgtaccgacacaggctatgtggcagagctgctgggcctggtacagctcatgtgctgtctccatatcaagcacaagtgtcctgttcctggagagacattcccctgctggaagttcggtgtccagagccctctgtgtgaatgaggggaacacacacacacacacacacacacacacagatggctagacttggttgtcaatttgacacacctgggaagaatgaccctcaatgggggaattgcctctggcagattggcctgtgcatatgtcacaggagggcccagccgattgtaggtggcgctatccctgggtaggtgggcctgtaagcaattgagtggagagcgtgtgccatggtttctgcttcaagcttctgccttggtttccctcaatgatggactgtaacctgtaatctgaaataagacctttcttctccaagttgcttttgctcatggtgtttatcacaatagaaactaacgtagaacaagagtattttaaggcttagagtcaaatgtatcttgagggccagagagatggctcagtgagtaaagggtgcttatggtcaagcatgataaacgacctgagcttaatcccaggatccacttggtgggaggaggggactaacacccataagtcattctctgacctctacatgtacatcacaagatgggttcttgctcatacacatacaataaatgcaacaacaacaacaataataatgataataataattagaatccatggattggtgttctggtttctcaccatgagtttgtagatctaggactgtagatcttcattatattataaccatatctaatatccatccagacttatattcgtattaatttcctggaaacagtcactgtatttcacaataataccctcatataaaatagttcagtgttacaattacatgctcacaatatattaaaaatgtttgacagaccaggcacattctctttttatttttatttagtacataaagtattgatgctgactgacatggtgaggtcatccagtattaaaagaattggatcctttttctatgttcatttaaagactaaaaaggcaggaaaaacaagatctaggtattcagccaagtttctgtgaaagcagaggtgcacacagcaaagcacaaagagacagactccccagagtggggacacaagattgcatagaagtctgtctgacaagacttacatgttcggaggtgggatgattccctttctttggtggcaattgcaggggattggataatctagacaaagaaagggtaactgattggttttccccactggatccccaatctctgtgtccctacccatctctatgtttgcataatcccctcctctacaagctctttccacctcattcacataatgagagtttctcccccgggggtatatgaaatgtccccctcaagccggtttcatacagtgttgaaaaagctagaaggccacaggatagtgagacagccaggaagtcacaaaagccacgcaccaccgcgtgctcctcagataggtggagctgaagagagaaatgccctggcttctccttcctcccaacttcaaacctctcaatggtgcttctgattgactgaataactcccagctggcaatgagcaatggaggagtttacagaggtagccccagcaagagaagcagggggaggggcatcctgggctcctatgtcccctagcatctcaccagctacacaatacagatctctaactgtacaccctgacctcctgggggttgctctttgacacttgggaacaagattgcttggctcatttgctgttttccctcacatctcacttgcaactgagccatacattgtgaaggtcaggttcttggtacatcaggccacaaagacccttcatgatgacaggttttctcagacagttccctagtccagtacccttttggaaaactaatgctgtttctaaaaaagcagcagcatgttagttgccttcttgacactattatcaatacccaagagggcactataatagaggaatgctatgttttagctcatggttaaatggccttccctgggtgcttgagcaagggcaggaacaggtggtagaggggtttgttcacttcatggaagaaaggaagcagggaaaggagacaaggacaggcccaggtaagacctttgaggacatgctcccggtaaacttgactgtatttagaatcacatagtcaccttgggtgactatgaatatgtttaaaactttttttagccaaggagtgttatgtgacattttaattgtattttgacaataaaacttgcttggactcagagggcagagctagccacttgctgaccaaaattaaccatagaggtcttggattgaggacagataggagataggaagtagtaagatggggctgagagaagatttcaagccttttagattgatgaacaaagagagaggaggtgactggtggcttctttgcttttctgactccgagtaagctttattgtcaggatacgatcaaaacaccacacaacaaaaggggcaacttccctctgaaggtgggcaacagtatccagtactcagtcttgaattgaataaaaaggaaagtgagtttcctgaatgtagatgcaatgtgtggccagccacctcatgtcccttctgccgtgacttcccccaggatgatggactgtctcatcagactgtgaaccaagaccaactatgtattcctggtggcccactaacttttgctagggcccaagtcctaaaattcccacaacttccccaaacagctagggaccaaggttcaacggcccagcctgtgggaggcatctcacatgcatatcataacaaaaggtgaccagctttcctccaactgtgggagggcttgctgtttcttgagaagcaacatgggattgacttgtccttaagaaagatgttactcttatcagggaggtgaggactctgactgggcctgagaattcagtggacataagccaggttagcaagagaaaagcacctatcagcagtgtgtgacatgggaacagctcaccaggaaaagaagaacaaaggaggatgaagaacaaaggaatggcaaaacccaaaggccttcgtgtcaggctgaacagagagaggcagaaaggcagactgaattatatgggaggctgaaggaaggtggggggttcaggatctgtttgtatagaatcctcccagtgagggagcccatagaagaacgtttcttttccctgccagaggacagacatcttccacaccggacttgtagccttctactttgaggaagaagaggggagatggaatgtttttttatttttcttttgtttagttttgcttgatgctttttggtgctagggatggacctagggcttgcagatgctggcaactgctctatgacccagttgtacctccagccctaggatgcttttcctgcaactgcatctttaaaaatgtctctatagtcctgtcttcggtctggtggcctctagtaacattcggtccatctagagagggacttttgggtgacagcttgtcctctaggtgcagggactctgtggctggaaaaccctggttccacatccagcattttgtaaggttggcttgccagcctgcacactacatttctgtgtatgtttggagaaatcaattgcttgggtctctttcccttctctcccctagagatgttacaggcagtaaaagtgtccaaatttgtgagaaattggaataatcaagacttacctggatggaatgctattaacgacagcgattcacaccagaatgcctttcatccgagacactcggggtctgttaacagattaaaagtagtaaaagacaccggcctagagattttcattatcttgtgctctgaagactcagatttcattggtttgatgggtctgaaaacacatttttattgctaggggcatagaagcctcgagcagtgttgttaataaagcaaggtgagttatacgcgcttgtctgatggagggtaaatgtaccatactccgttttaagaaaaatataatataaaagtcttaccatggaagaaaatctttatatgatcttttaggaaaactttaagaaaaataaagacatgacactatattaaatttaaagccagtgacttataagcagaggaaagcaaagacagtctgattaaggccgtcacagtgttctgacaggcttttatgtcttgcctgttctctggcctccttagctcataggcttttagggcacacaggaaactccattccgatgtagcacagagaacacgcactgagaggttctcaataaacaggcattaaatctgagtccggaagggaccttgagacgccctctctccactcttcctcctcctgggagtggtgcgctttaaccagcccagaaaaacagaattttcccttgaaatcactaaaatcagagacttcaaaacatgagttaacttctcctatttgcctggtgtttttcttttatgttttttaaataatttagctgtcttaaggcatctaggatagagggccagctggatgcacactgctgcgcagagatgtcggtacttttccatgttgttaaactgacgttctgcacccatttggcaactatcaccctctcattccccccggctaccccaacctgtcgactctgctgtttctgagtttagcctcctcaggtatggagtcagccaggcttgattattgtgtggctggctcatttcatttaccatggctatgttgtagcatgacataatttcttcctttttttaaagggtgagcaatattgcatgcactgtatgcacagtccgaattccttctgttatcctttcactcatccaaagatgtctggtcaaatctacctcttttctcatgagagcagagctgctttcagcatgccttttcgagactgcttccaattcttctgatacaccagatgtgggaaagtgtagacggtgggtaatcacatggttgttaccttgacttacctgagaagatggaatctcaactgaggggttgcctcagttggtcggcctgtgcgcgcatctgtaggtcattgtcttgattagtaattgatgcatgaaggccccgcccactgtaggcggtgccatccctgggctggtaggcctgggctgtataagaaaagtatctcgggaagtaagttggtaggcagtgttcatctgtggtgcacgctttggttcttggatcagcttccctccctgatggagtgtgatatggaagtgtaagtcaaagatacgtttcctccctaaattgcttttggttgtgtttattgaagtaacagaaagcgagctacaacagtagatacagtggtatgtctgctttttattctcttgagcccgccgttttgttttccatggtgactacagcacagttttacacttctttggttgtacatgagtattccagttttttcccccaccctttctaaattgtgatattgatttgaatttttctggctacggatgatgctggacgccttttcatacactggttatctgtgtgtcttctctgaaatgtctatttgaattgtttgccaacgtgtttcagatgggcccttgttgtgttgcatagactggggttaagtgctgaattcttggggtcaagggactctccctgctcagttctgtaagaaactgggactgtagcactggtcctgtccagcacaactttgttgttgtttttggaggggttggaggtgggaaaactgtgtagcccaggctggcctccaactctaactctctctctctctctctctctctctctctctctcggctttgtggctgtataacacccccccctttttgagacagtttctcattgcatagcctggcctcaaactcttgattctcatgagtgtggggactacatcagacccagctgtaattgatttaatttttatatctagcctaggtagcggttagatctccttctcctgtgggtttccaccgcagggcttgctgggtatttttctcctttgtaaggttctgctccttgttatttggtgacatgtgccatgtttgagtctgggatctctgttctgcctcattgatctgcctgccttcacactagtgccaaactgttttgatcatttgaggcaggaccaaggccctttcccacttatatctaggctgagcaatgtatcccttcaaaaaaaaaaagatgggctccataaagtccaagcactagggagaaatcctggccccactgctggtggcccacagactgcccaagccacactactgtcacctgcattcaggggacctagtttggtcctatgcaggtctacccccccatcagtccagagtcattgagcacctactagctcaggtctagctgctagtgtttgtgtgcttgattttgtgtcctgcaacctgtgcagtgtataccttaaccgggtgcagcgctaaccgggtacagtgctaaccgagtgctgtgttaactgagtgtaaccgggtgcagcgctaaccgggtacagtgctaaccgagtgctgtgttaactgagtgctgtgttacctgggtactgtgttgttaactcggtactgcgttaactgagtaaatgctgcaataactaagttctgctgttaactgggtgctgggttaactgagtgaggcattaaccgagtactgtgttaacaacagtagagagactagatgtcccggatttgcttccgacctcgagcaaagctttccattgaggtgctgttctgtcattgtgctcctgtgtatgtccttgagagtatgagttatttgaagacactggtccacactcctggcctgtagtctaggctgtggtgctgtgcactcatagccttcctaggaaatgctttgagttggaatggaagcttgcggtggtgtgctatgggaactcagtgcttggccatgccgaagtgctgtatttgtaggtctggtgaagatccagtcattgaggataaggcagggcttatgccctgtgaaaccctgcttcattttcatggttgacccgaagactgtgaccctagggctgaggtttttatgccagcttagcatttctcagatttaacatgcatatggatttttctgtttaattttttgagaccgggtttttctctagctttggaacttgctcagtagaccaggttggcctcgaactcacagagatccacctgtctctgccccctgaatgctgggatcaaaggcatgcaccaccactgctcagcagataatggcttttgatacagagacttagtaaagcccggttctagcactgtggctggctagttttctctctctgggaagagaactctcaattaggaaggcacctccataagagaggcctgttggcaggtctgtagtacattttcttaattagtgattgctaaaggaaggccctacccattgagggtgttgctatccctgagtgagtggccctgggctatataagaaagcaggctgagcaatcaagtaagcagcactcctccatagcctctgcagcagtttctgactccagattcctgccttgagtttctgtcctgacttccctggatgatgaacagactacacgttgtaaaaagaaataaaccctttcctcaagttggtgtttcaccacagcggtagaaatcctaactaaggcacactgtgtcctgtagcaaggccctggacaagatgttgcatttctaacaacctcccttccaggtgctgtggatgccattgattgggcaatggatgatatctttagctcctgtactgttgagtcaaggtgagcccaaaagacctatgggccttgtgtcttagttagggtttctattgtgtgaaaagacaatatgaccatggcaactcttataaagaaaaacacttaattggggcttgcttacagtttcagaggtttagtccactatcatcatggtgggaagcatggcagcatgcaggcagacgtggttctggagagggagccagaagttccacatccagataggcaggcagcaggaaaagagccactgggtctggcttgagcgtcctccaacaagtcgacacctactccaaccaggctgcatgtcctaatcttttcaaataatgacattccctgtgagcctggggggcggggtcttctttcaaaccagcacaccttgagtccagttccaggctgtgggaattatgggctgaccgtctgggattagaaattcactctcccattccatagttgtgcaattttggggtaaattaatctctctggcatgtttctctagcagcagaatcctttactcatgagcttactatgtgaattgaatttgataatagatctgtgccagagtagcatccaagcaagctctgtttgtaaaggaggcattgttggaaggaaaggcctactgtagcactacatgtgctctaagccagtcagagatgtcagactccttccacctgtagcttagacagacaggcagtaaaggtagagaaagtcatccacatttgggggctacaggcagcagtttaaggtggattacaggttgctcaacactgtctctccaggccttcactctgatgtcccccatcctctgtgggtggatcccttcacagccaaaagggagaagaatcagcacagagacagctctttgccacttggagacattctaagtatttaaataaagcagtgtcttttgggggagtgtgtgtgtgtgtgtgtggggcaaattccatacctcaattggccctgggtacatgctagtgtagacacattggcctgtgggtttaggcactgggcagacattaaggggcccttagtggcaccgtcttactatgttacttctgtttttccttttctttttctttctttctttctttctttctttctttctttctttcttctttctttctttttttttttgagacagggtttctctgtggctttggaggctgtcctggaactagctcttgtagaccagcctggtctcaaactcacagagatctttctgtgctaggactaaaggcgttgcgtcaccactgcccagcctatgttatttcttaattaagatagcatgctctaagaacaggggaggagggctgtaaagttagttgttgtgcctattgcttcagcaataagggaaaaatgttattagcaaaaaatgttattagtctgtcacaccttaatgactagatgaaaacattgaagaagttattaggaattttattttcttcaattcttctttagagtagagcctggtcctctccaaactcaactccaaatttaagtcaggaagcttgcattttgatgtgttactcttgggtttccttcagtattttagaagttagtcaagtagaaaagaatgatcaaaggtagggtagattaataacactggtctcctgttaagctgagaagggctgctgtgtacaggtggatagactgcactgcccaaagcaggtggggatgccctttatttattttaactattattattattattattattattattattattattattattggtttttcaagagagggtttctctgtgtaacagctctggctgtctgggaacttgctctgtagataaggctggcctcgaactcacagagatccgcctgtttctgcctcccgagtgctgggattaaaggcttgtgccactaccacccagcctggggatgctcttctaatgcataccatagatgtggaaaaattttcagtgttatgactgttttatatatgagtagaatagagaagtccctttccacagaggtaattgtttttcctagtatatggcaaggtctggagacatttctactgtcacaggcaggcaatgtgtggcttatacctagtgtatacctggcagccagcccagtggagaagaattcatctcagagtggtactggcatgagagctggaaagccctcctagaggaggaaggacgcctccctgggccccattgccatcttttctgcctgttctcgagaagtcactgcttgacactgatttttttctttttccttttttatttaaattataaacaagcttcatttatatgtcaatcctagttccctcaccctccccttctcccctgcccctcaccaacttccatcccatctcttttctgctccctagggagggtaaggccttcatgggagatcttcaaagtcttgacagtgatttctgattttgctagttgtacagcaggtgccatggaactggcttgcccagagcaaacccatgctctggctgggctgggaagcaggtggaatcatgctgggatatgcctgcttcctcggggccctcatctcagtaggccaagtgtctcagcccctataggcctcaatgctgaaacagctttcctgggcccacaactttccagattcctagtccttgcctctctggaatgggagacagtctccttaggtctgtctaaatgcctctacatggcagcattggaaggtcttgtgacagtggaaagtcttgtgatcagctgcaggtatgggtaacagttctgagatggagcagaggacttaggctggtgactgcctgttctcgagaagtcactgcttgacagtgatttttttctttttcctttttttatttaaattataaacaagcttcatttatatgtcaatcctagttccctcaccctccccttctcccctgcccctcaccaacttccatcccatctcttttctgctacctagggagggtgaggccttcatggggaatcttcaaagtcttgaagacttcctgtatgccagaaggacagctttggaagtctccgagcctattttgtaacatggtgtgatatctgcagtaccactgtaccaaggtgatggttaaggctcacccaaagcatgcagtgtgttcagagtagcttttggcaggaagcagcatcctgccagtattgcctattgaaggacttgttccatattggttatctgggtgtcagacagctgtggattcccaaggcaggagagcctgcattcaagtccctgccatgtacctgccacttctgttgtctaagacttgtaaatttaggatctgtcctcttcatatgctcagagaaactctctctctctctctctctctctctctctctctctctctctctctctctctctctctctctctctctctctctctctgtgtgtgtgtgtgtgtgtgtgtgtgtgtgtatcgcaggagagatggctcagcagttaagagcactgtccgttcttccaaaggtcctgagtttaattcccaggaaccagatgatggctgacaaccatctgtaatgagatctgttgccctcttcctgcctgcaggcatacatgaaggcagaatactgcatatggttggtccactgtggccacgaatgcttggcatctcttcctctaaggatcccagtcacattagctgaggaggacccatcctaatggcttctttctatctcaaccaactatttctttaaaagccccatttccaaattcagatccataacccaggggctagggcttccacatagattattttaggggatgaagttctgtccttatacctggcaaggacctgctaacaacatagatctaagggtttaactgtggtaagaaatagaagagctgggtggtggtggtgcatgcctttaattccagcacttgggaggcagaggcaagcagatggatctatgtgacttggaggccagcctggcctacaaaactatgcagaaaaaccaacaaataaaaagtagaaggaaagccacattctgaggtaaatcctccggcctgcacctgtattgattgtattttgcagcaaacatcaggtgtgaccctctcccagtattttgttagccagttggggatttgttagagccacaagcaatgtgatcatgtgtcctagtgtgtgtgtgtgtgtgtgtgttttcttggcagcccagctctcaaaagttttgtcttgtctgagaacacttagatttttatttttttgagtcagggcttctctgtgtagccctggctctggcagctcactctgtagaccagactggcctccaactcatgttgatccacctgcttctgcctcctgagcactgggactaaaggtgtgcaccaccatgcccagcttagatcatattttttttttaaaattcaggttccagtgttgacttatgctaattatagatagctatggtgtctcttaacatggcaaactagagaactaggtaggggctggaggcaagaccaacaatcataaagaggaaccttatccatgactaagctgcatcctcagtcagggcttactgtagcatcaggcatcaccatctaaatgttaggaacatccccaccccctcctacagtatgtcagtagaggcacttaaccccaagtttcctagcagtgccatggaacttttcgttcctcttggttgtgtttgaagtctattgaaggaagtaaagttaatatcaataaagtcctttacagatgtgctcaggggctcttcttccacttagccattctttagggctcaaaggcagtgacttgctgatggaacctggcaagtgtgagtcttggaagcaatacaatgatgcactgtacatgcaaaacggtgtgtgtccaacccatacaacaaatgatgttagaccactctctggcctcactgggaactgttgctggagaggttcacactggtgcttagtacagcattctgtgggggtggggcagaaccggaaaaacaaacacagaagctatagattgcccagggcatttgtttgttaaccagccagcagaccctcatccataggaacagtgcacatgttggctgggagagacctgaaaaatcaacatctgtgaacaaggtattctcaatggggcagggtgatgagacctcggcttgtattttggacaataaactctatttatgatagtctccggtcattaagttgctctgctgtaagagaaaactgaggctattaacttctttagacagaaccagggggaagaatgatcattttgtttataagcagaagggaaggttctgctcaataaagatcaattagacatctctgttaaaaggctgtttgggagcagggggcggggcaaatgggattccaatttgttctatccttgtgctgtgttccctctactgcctcctgctcataccccactctgagaaaggtttcaagggattctggacagcataaatgctgaaaggtgatggtgactctccaattgtgactaaatggcacttgatggtggcgcctgcatgcagttggcagggttattgttagggacagcaggcaacccacagctatgtgtgcaaatgagtagcactgtcttcaagcagggtgcaaagtatgagcacagccaccccaacagagaacttggtgctgtgagctgtaaattcctgggatttagaagactccagactccagactcctggggtgtggtaggataaagaccacagtccagtacaccccacagcaacacttgccacttgaagcctctttctagctctaagcactgggcttctgtttcctggcttatactttgtccttcatgtacagttcatcttctcttgtccagggtcagttgttttgctttccgagtccttagaattcttgctccatgagtgattttcaaatgttggtctctcatgatgggcactcgtttttatcttttctgagtgaatccaggtagagtgagtgaccatagctctattccatttgcatttaaaacaatattttgttggattccaccatccccagtaatgagccagacatcaaagcctgcaacttctctgcatcattttctacttccgtgtactgggtcatcatatacttagcagttgattagatgttaatttgttatccctatggttttgtggtaaaagtgggcatactataggtttggttatgctccctgctgtgaatatgtggtgttggccaaggctgtcaatctcattggaggctctatgaactctctctaactcactcagtcacacactcagtcacacactcagtcagtcactcagtcagtcactcagtcagtcactcagtcagtcacacactcagtcagtcagtcacacactcagtcagtcagtcagtcagtcagtcagtcagtcagtcagtcagtcagtcagtcagtcagtcactcagtcagtcagtcagtcactcagtcagtcacacactcactcagtcagtcacacactcactcagtcagtcagacagtcagtcactcacacactcagtcacccacccagtcactcattgcattccttatggatgcaaagaaaggggccattaccttgatgatgtctgctgagaatactcagcagccagagtcccctcacattctgtatgtcatggctccttcactttaaaaccagacatggattctcccagttactggagttgctagggtcagaacttgagccctggaagctctgattagctaggtttgaccatctgtcctcaatggacagctaaggaaataatatcaaaaagcagagtaaggggattttttcaatatggccacaccgagaagagaaacaaagcagcccagtgactccctcagtgcatctaaagggccctggcatgacatttaggcttaactagaaggagagaggagtatatgatggatcagtactggtccaggtgtgatcctgcccatcacctactgtcactgtctcagttccagtctttctgtggaggtgatctgatgaactgtcaggactgaggggaaacttcctgggaaacaaacctttcctctggctggcaccaagcttcagccttttccttttcccgacatgagattccgtgagatagtccaagttgttgaggaccactgtttgaatagttggacaagtaaatacagaggtacaagtgtctatgtggaataccttcattcctgctagcctagttacccccacccacaccatctttctcctgcttagattctctctgactggcctgtctctgacctttagacccaggtttaaagagctcatcttttccaatcagaccagtgtgactggttaattgggaagagggtatgtgacagtggagaggacaatcttatagccaccttggaattctgctatcacggccgatgacttgtagctttacttgtatgctttaacccactggtgtcctcctctccatcactcggtggtatagacaggggatgctacaaacctggatctgtggaggggaggtaaagtctaacaccaactttgcttcctgcttcaagtgaggcttcatggtgtttgggagactctcccccagttgtaaccacagggtgacagcaagcagtcatgtctcttttttttttttttttttctttgttttaagatttatttatgtatacagtgttctgcctgcatatattcctgcaggccagaagagggcaccagatctcattacaggtggttgtgagccaccatgtggtttctaggagttgaactcaggacctttggaagagcaggcagtgctcttaaacctctgagctatctctccagccccagccatgtctttttcaaatggaattctgagtgttcagacagggacccacagatgatggccagtcatcactctttataaataatgcattgaatggcagcttctcctacccacccctctcactcacccacaggatgacttgacttatggtcaacaaaccaaaagcgttgtctgtctctccaccttgctgcttctgggctaatgcttttgtcttctcaggtgataaaaaaaaaaaatcacttggtggcctggtgttgtagctcggtggcaaagctagcatatctcacatgcatgtggcctcagggtcaatccctcaaactgaaaaaaaaaacaaaagaccaacttaatcatttgttaaaaagacaatttctggggctggcaagatggatcagtaggcaaacctgcccacactaagcccaataccctggcttttatccctttactcacagggtggaaggagaaggccaggttttgtcctctgacctccacatgtgtgtactgttgcacacccactcctccccccacttacccaaatgaatgcaatgaaaatttagaagaaagacagcttccagtttggcctaggtctgaattctgagacgggtgttagggcagtgtggagaagttttccaggcagttctcagctccacagaagcgctgttctcaggtatgccttccttcctaagggcaagggcagatactttaagagagccttggctgtcaggcatgaacttaactcttttttttttttttaagattttatttatttatttatttatttatttatttatttatttatttatttattatacagtgttctgcctgcatgtcagaagagggcaccaaatcttgttacagaccgttgtgaaccaccatgtgattgctgggaattgaactcaggaattgaacaatctgtgctcttaccctctgagtcacttctccagccccggacctcattcttaaaacacctctgccacatttgtttgtttgaccttggctgaggctgtctagacccagagcttgcatagggcaaactgtgtgctcaagagtgggaacactcattgaagtggggccctcatgtacgctagggactcggcctgtaagtgagaggggcctggcagggctttgctgctctctgcagtatgcaggcgtcttcctcaggaggagagacttcctgtaaatcagctttccattatgtggcacattgaggacaaaatcaagctctttatagattcagaattcccgcagatcaccaactattgcaagaggtcaaagctgattatcatacagccaagtttgcaagggaatatttaattttatgattgagaaccctgatacttagcaggaaacctccaccctcccttatttctgaggttaatgcttttaaaaatcattgcctgatgagctcatgcaaattcagccatctgtatagctgtcgaaggaaagtttttagacaaattgctatgcttttgccacataaatcctcataagctacaggaccccagtaatacttagagtttccagggagtttcatattttcctaaaaggggaaaaatcaatcttgaatcttttagttcagtgaccaaagaatcacttgattgatttttgttccgctactcaggtgagcacaccatctatcccaatctgatgttatcgggtttgaagttgaatttttctgagaagtattaatttgagtgttatatggacagtactgtaatactaggccctctttacagccactttatacaacttatacatgtatccctcggtagagtttccttggaatattttttcctgttcagattttgtttttgccacacacaattcttcttctcaacagcagagggaggcaaagctttatctaatagggcctaagatccagactgtaggaaaagactcaaataacagaatacattctgacaagtatgatatagacacacacacacacacacacacacacacacacacacacacacacacacacacaccacgtgtgtgcgcacacaaaatcacattctgaaaacaggttcattttacttctagttcttaaatgtaccagttgagaaccaaggaaaaaatctgtagaggatgctgggaaggatattcactttgatgaaatttggtgttgggggtcttggtggtaccctggatatacagggtgattcacaacctggctgaattcacacctgaatcagacttttggtcccattgattgagctccaggtaatgaccctacaactgatggtatattttgttcttcagtaagggaaaagccagagacactgaaagctaggcacagcatggatcctaactgtgacttgactctaaggcctcctgagcaagcaccttccctgactgccaatccacacagggattgtggttgcaagcagaggactaaggactaaagtttttggcctttgtggaaggctgcagggggtggagaatttaggggcatttgttctaagtagccagtggccttggctagactctagctggtctgtactctgtggatttgaggggggcaaaggaagagaacctatggatggacaatatgagcaatactgatacttttgatagcagcccctgggtgactgaactgggtgcagcttgcctgccactggcctgactgccactgtcttggataagactcctgaccttccctgttctctacagaatggggagtgtaatgcttatattcctcagaggctgttatgaacacccagtgaaccgtatttttgaaatgaccaagaactctaaaccatatatgtggaaaatagtgtctgaacttgaattgaaatgacacttgactgggacagaaagagccaaggcaggcccaggattagagtgaagcaggctgggcggctaaggcacaagaacaggctgcccctgctctgccagctttctcttccatggtccaagcctggaagcatttgttgcagaatctgtctgttttaaaaactagagttttgtttctccccgtttctgctctgcctgtcagtctttatctatgatttcttgtttcatttagtaaggcagtttggacactaaacccctctcttacaatctcctaggccagggtatagctaagggtagagtgtttgtctagcatgcacagtactctgggttctgggatggggtggggccaggggtggggacaagggggggcacatcaggcatgaacacttacctctagttagttccataaaaggatctgactggtgagaaagcagcttcattagggatgggagagggagggtatcaacacctcaggggcttcactttaaatatatgcatacccatgtggttaactgatacccccccctgcttctaagatgagagcacaatttatctgatgtatgttaaactggctaatttgacttatcagtgtgccccagggatctccagtaacaaaatctggatgctaacttcactgcttttaatgactgcctatcgtctacaataaatggcaggatgggctatttcttcactagtcgatgtttgtgttctctctttcacccttgcaaatcgtctacagtgctagtatttctacactttgcattatttccttgcatacttaaaagcttaattgctggtcaaagatgatcatgagaggggtattttgggtgctgggtaggagggagtatgtctctgttattcttcttgaatgatcaatgtatgaatactatttttttcacttaaagtaagctgttaagtaaaaactggaaaagttatttagaaaacaatccacagtagaacataacagtacaagcattactgtttggggaatactagcttagcagaataatgaggtgtctgctcctcactgtgccatgtaaccatccggcccatctttgctctgctcctgggcaactatgctacagcgatgtcacgactatgccagtgtagcgccacccagtggctctctggggaggatggatttgtttccaagaaatggatgcaaaatctctaggaatcctggagggggcagtttactgtaggcagaatccctgtgtgaacagcaggggagagccgagccagtgacatttcagttattgttaaagtgactctgtgtgtcgccacaggctgatgcctggggcaactcgggttactgttaacttttgaatgaatttgcattttatgtcttacagcacctccacatattaggacaaaatagtggcaatatactgggagcaagtcattcgctgttctctaggcagtgcttatatgactttggggacctctgccataactctgtggtccataagttgggaaccactgagatgggatattggaaagctgagtgcaaatgaaatcattaactcaatgtcagggggagcgtactctttaaaggaatcctggggtgaattcttgccacactgaagacacttctgccattcctactcatgagccagaataactcctctatgtaacagatcgacttctcaggcggcttattacccctttcccccaggaagccccaccctgtaatgagcctggtgtcctacggacaaacactatgcttatttctgcctctaaatctttgtctgcttttccgtcttcctgaaattcagcctctgcccctgtttcaatgcccctccttaagctcccagagtcttttcagcctactggtccctccctgccccccaggtaacctttccttctgtagacttttgacatctgcttcttgaggtcacacagctgtcctgttccttgttccttgttttgggtttgttactgtcttctcagctaaaacctaaattttctgacattgggcatgctcagagctccttagagaaaggtgccagacaaactgcagtgtaatagcatgtaaccggatgcataatagaaaaaaaaaaaaaaaggcagggagcttaattatgtatgtgtggccaggggtggtggtagtaaattttatatactggaaattcttaaagtgatttcaaagattatcttatctgtcaactcaatcatcactatatatttggttctcatttctatccacaaactatgaattaaaaatatctgaaaaatgcctttattaaataagtacagtcttttcttgtctttattcctaaataagatagtgcaagggctatctgcatagcatttgcatgggggtgggtttagcaaatcatctagaaggttaaggtagatgggatggtgtgtgggaattacatgcagacactatagcatttaaataaggggcgtaaacactccttagattttgctctcccttgtgggtcctggactcaattctttgggtaccaaaggatggctgtaaatgtgctggctatgttccaggaacattgctatttgaaaaagtgaagaaacactttagttttctggcaatgacgaatgggtccattctctggagaaaggaccttcatgcttgctggcaatggctttgagatgctggattgtgtttattgtctatgcccttgtcccccgagtttgccctctgttcccacatgtgccctatggaccatcattcagtgtttacaggaggtagagaaggatttggggcagtattgcaccagtaatggatagcattcctgtgagaggcgtgctaaccaatacagaaatcaagccagttgctcagacaactgaggttgtgtgtctgcagcaggggtaggttgtgtgtctgcagcaggggtagaggcccaggttttgctgatggtatagccctgtgtttgtagctccagggcttggcctgggatgtaggctggctgacttctcttgatgatgcctgtacttgttctgtgttgggttgactttttctatgtgaaaaattttttttctagcctgtgggttaaaagcagttatttaatgtatacaggccactgggcaactggtaaatagtagaagtttaggggatttaatatcttgggaggatttatgccaattacttaactgcctgagtaccaagttcttcatattagctttataataagatgtgctgggttccacatttatcccaagaagacaggcttacccaaatcatctatatttcagcaggcagtgccaaacttcaggcctcagaaacacattttagataatttttgccatgccatatattttaagtatcattaaaaagccatttccttactttaaaaatatgtgtgcaatatattttatgaaacctataacaagtctatgaaaaattgattattttttccatggggatacgttcaaatgattttcattctgctcacccagtgaaaaatccagtgagcattatgtcttttatcttatttactccctctcatgtgtataatcaccgtgttcccaagaaagagaaacgggcttctctgtttgggtagccaaataatttcctgttgtcggcagaggagttgatgtagatctaagctaggaagcgtggctttccctttcaaatgccttatttccctattctaccttctttcaaccaactccactgggtcaggggtacagaagtgagtgatgggcagtaagggtgtgggagggacatctgtgtgataggcgtgtgggacccttgcgggacaaggaagatgtgagcagcctcataggcaaagatactcattgttctgtcccagtgtgggattgttagttaaaggtgcaaatgaccccatttcctttcattctgtggctctctggtacatgggctgcaagctgctgtgtaaagctgcaacctctagtgtctcttctctccctcctcctcagtatggaaccatggcaagagccatcggtgttcttcagcaccacagtctctcccaactgtgccaccgacttttccatcacttgtgacatccttagaacaggcaagctaagggaactgggcagcttggagagtgttgagttatgagtatagagccgcatccattctcagtgtggaagaacaaatggccttgggtggggcacttaccgccctcatctcacacaccagggctcagactaggcggagcagctcagcagcctatggttcgctctgagcagcaggaagaggaggacccagggagcaggattcactaagcagtgggagcagctggggacatcataatgtgctgtgtgcccaggtctgacctgtgaccctgctgagttgtggttgaagtagaaggacacaggcaaacacataagctaggaccacacgagggaaggtcgcatggaccgtggccaggcgttggacttgatgacagtagacagaccataaagacttctgagagagatttgagagcatgacttgtcctgaggcttctctaggaccctagaatctggaagttagatgtttaagggaaagcccttggcagctgctgggggagagagtgggcatggaagggtctggaatcttgggcctactcctgctggccaggtggccctagttgagggtatttacttagagagctgctaggtaagatttcctccttgtaaaaaaaaaatcatgagatgtaaagtttaccatcttagtaattttaatcatgtggttcagtgaagcaggctcctgtcatgtcctgactcttgcagagtcagtctaagccctacacacacagacttcccattcctctcaaccctctgtccacccccaatcagctctgtaactcccgtttctctgaatctgactactcagaaagatttatttggggtggaaaataggcttaccaccaagatagcctagaaaaccactcatccatcaccttcgctccccacccttgctgtgacgcaaaggagaccgaggtgctgggaagcaaagtagtgcagtggagatgtgtcataccacttaagcaaggtggctgggcctgcagtgttagagctcctggcggtgtgaaaagcactggtttaattcagggcctcagtttcctggtccatgaggggtaagagattgtgcatcacagccgtgtaaggactgtgtgaggtaggatgaatgggtaccttgagcagtactgccacttacataaataacccctgctgctgttactgttaactgacttcctcccagctccctaaaggaaaatttttcctgccgccctgcagccagcgccctttcgcagactctcaggagtttctcgcataagaccaaatgggtggctttaacttggactgtctgatcttcctcacctggtgtatgtcactgttctggagatgtttcgagaccttggtgttcaaggggaaatgaatacagtgcatgttctgtagcacagagggatgggtgcctgtgacaaggattcctcaaagactggcagtttctatgaagatggtgaatgacaaccaggccagggtgcccactgtcagagagcctgcattgtggcagcacatgcttttgcaatgacgaccttctaatactgattttttttttttttttttactggtcttggaacagctcagatgatgccaagttttccccaaagtgctcaggtttggaaatggaacactctagacttacggctggcagtacctttgaaaaatggtttgtgaagatagttgctaaaaaatggtgtgggaatattggtgctctcaggtagtgtaaatatatcttgaaacttggtatctgaaaaattatctcaacttcttatttgaggctcttgcatttggctggcgcatgtgtttagaagttgctgaggatggtgcatagcttatttacccttgcctcacttaaatgtctggaggaaggtaggatttcacctgctgtcacttatcttgaactttcctttcctgttcagtgtgagaggtgacatacagatacaacaaggtagctaatggtgtggagatgagttttagcgggtaagaaaatgggatgtaccattagattcagatacactgaagctcactggtcacaggttggggttaggtttccactgttctgacaaaacatctgagcaaaacaaggaggcagggagatggatattagtttttaatttctgacaatcgtggtgaggagggcatagcagttcactgaatggcatccaggaaagacagagaaggtctgcactcccagcattctcctctgattctgtttcccagggtccccagactactggatggtgctacctgcaatcaggattggttttccttacagaaaatgcctttatcaatgtgaggcgtgctttactgatcccacacctaggcgattctaatccaaatcgacaagatttagcatcacaaggactgtgaaagtaggaaaagaatcttagtcagggctctggacctgtctgatctctctctatgtcatgtgttgcagccattactagaaagtatagcacttctttcattggttccaacaagctcattctttgtagacattccccagcagggcacttgtgggcactacattagcagtgagtcacagctgacagaggatccgtacctcatgggccatccagaactttggtggcctttaaaggtgctaggcagctgtagctaaatgattattgttaatgctgcctacaattattcccacttctttggcactgagacccttattttgttcatgtaggtgcagaaagcacttaatctcagagaatcagaggctctggccctaggagatggattgtgaaggcctgggccaattttaacaaccatgctgctgccctttcaaacctctcttgcagctctatgcggtttggtaatttctaggcaagatttgaaagagatttcccagataagacagaatcccaggagaaagcttttctgccgacccttccttcagtgttgagggaataggctgtctccaacaagagcagctagtgtatagccttgagttataaaagaaaataggttgtcaccaaaacagaactacctgctccaagaattcctgtacatgtcttcatcacattgcctgttagctatgaaagctgaagtgtctatgtaacaatctgatgtgttctgtggcaatggcagctcgaacctctggcataataaggctgaagacacagatgttatgatagtcaccagatacaacatgctttggtgcagttgggtggggaggagagaagagtaaggactgaattctgagatgcccttaaatccacaggtcaggaaagaggagaacctgggagccatcagctcatagggaacttgcccaaatcatgcagctctgagtcttacagctcttgtcttttatgcacaaaaacttcatcctggttggtgtactttagttaatatgaagaagaactacagaagctacaaaaaaaacaaggttagtcacttagggacttttctgaactatggactaagtctttgttcctgttttggcaggtgttggtgcctacttgctaggttttaggtcagaattgtgcctataatatggtgtcagttgtgttaagtctagggggaccgataaaacagaatctctgagtttgccattgggagatcatttatgaggtttggaagcagtttttgtagagtggtaggggcaaaagttggagtggaataaaagaagaaagatattgacaatgaacaagccttggaaggggttttgctatgaggggagatggtaaggaggtagctgagtgtagagtctaaccaggaagactatttttgtcaaatcaaaaaaattgtacattgtgaaggttaatgttgtcaacttgacaggatctagagtcatccaggagacaaactttggggcttgtctgtgagagtttctatgtgggtttaactgaggcagggagacccatgctaaatataggtggtagcactcactccatggggatagggcaaataacaatgagagtgagcacagaacaccagtgttcatcttgttgcttcctcactatggatccagtgtgagtagctggatccataacttctgtactatgacttccccgtcttgaggaactggaccttcacactttgagtcccaccccactgtgctcaggtattttgtcacactaaagagaaaagtgtctaatacaactaggcaagttaaacaggtgatgaagttttactcagacaaccgcaatatggaagacaggtcagaatgacgtcagacttgactctgctgaattgaggagtaaggtctctaagggatgaagtgagagacaccacagattttccattatgtttcttaattggtttacttaaaggataagtgaacttctgtctttatagtgggaggtaattttatgacttgaagcaaagtgtccctgaagtttttggctcctgactcattggaattgggagatgagagtgctgtctatactgatgacatttcaagagatagtccttggtccctgagaaatacattcctgagttgtgagaaccgacacagggctttgagaaagattaggcacacttttctaaatttgtttccttccttccttccttccttccttccttccttccttccttccttccttccttccttcctgtctctctctctccctccccctccccctctctctaagttgagaagagggaagtgcatgcctttaatcccagcatttaggaggcagaggcagcagatctctgagttcaaggccagcctggtttcagagccagttccaggacagcccagaactactcagagaaagcctgtgttgaaaagccaaaacccaacacaaccaaaccaaacaaacccccccaaacccaaaaaactttcaacaaattaaaaatagatttgttttgcatacaacatattctgattattgtttcccctcctctacctccactcttgtcttttgatcaaaaccaggcattaaagaaataaaaataaaatacaataaaataagacaaaacaaaaacaaacatcagaataggacaaaataactaaaccagaagaagagccaaagaaaaaaaaaacttacaacacacacacacacacacactcacacacacacacacacacacacacacatcgcgcacacacaggaactctttaaaaacataaaaccagaagccataatatacatgcaaagcacctgtaaccttaaaatcctgtcttaacattatgagataaagaaccttcaaagatgccattaagttggcatctactgttgggcatgggccctaccagaaagagtggtttgcttccctactgagactcccttggagaaaactaaattttcatttgcaagtggctatcaattggagacatgttctgggttaggcatgggtgtgcatgttccacttcttcctttcagctctaggactcccatctaatgcagacccctgcaggctgtgtatatgctgcctcagtccctgtaggttcatatgtgcaccagccctttgtgtgtagaaggccttgaatcctggtgtcctccatcctctctggctcttatgctctgagccctgagcagagggatttgatagagacatccttttagggctgagagttccagggtctttcaccctctgtctggctgtggatctctgtactaattttcatctgctacaggagggagcttctctgatgatggccgaataaaccactgatctttgaatgtagcagaatgttgttaggaatcattttattgctatattcctatagcagaacagtagtacctggttttcccttatgtctttggcctgtctagtctaggttcttggacatcaaagcagtgttagatatgggttctgtcttatggagtgggccttaacgcaaatcagatattggttggttactctcacaagtattgcaccagcacaccttggggacaggtcaccactgcagatcaaaatgtttgtagctgggttggtgtttgcctttcacctttggtgttgtgaagagtagcttccagtaccatgaatactagtccataggggtaaaggctttaggaagataccaacttgacttcttcatttttaatgatttgtgtaggtgtggtcttcagaaatataaggccttgctgtcagtttgtggagagcaactgatagccttggcaatatcctgagttgtattggcgttcccatgggacttctttagccaagaaatcaattagatgtaatccattcccagcaccagaagcttcatttggtgctgagaggtgtccagctgggactctgtctcatggagatggtctacacacacacacacacacacacacacacacacacacatctatatctatatctctatattaggaagcttctattgtatttggtttccatatgatccttcaagtagcccttaatttaagctgctcttccatattccttccctctacccccacttcttccacaatgtctagtcagttttcccttcctagggagatcccaccctccccctagtcacttattctctacctagcttctgtggtaatatggattgtagcttgcttaccaatgaattaactaacatccacatataagtgaatatatatcatatttgtctttttgagtctgagttatctcactcagtatttttttctaattctatccatttgcctgtgaacttcatgattttatattttgtttttcttcttcatagttttttattgatttttaaaggaatttcatatcttgcaccccaattccactcatttcccagttctcccatgtcctccctctacccttgtagcctccccctgtccccccaaatcactcctccaactttcccgcctctccattatatttgttgtagtggcctaggagctggggggtgtcatgcaagatactctttgcctacaacagctttacttgcaaatgcttattgcaatgagttgttggtctggttcaaggcttctggattctggtacaccatcaatcctggatcctcactgaaacttctttcagatatcctgctgttgctccaagacatagaattccacaggactagacccttcatggctctagcaggtcatagatggggtagatagatgttttggtgggccaactcaaagccctggatatagctgagttggtcagtccaggcctttatcaggactgcctgcctcaggaaatgttcagggccacctctcctgtatgcacggtgagggctggagccaattctttcacatgacagaccagttcttcagttgcagtggtccaaaagttgggggcagttctctgggggctgttgagggttggggccagctctcccaggcctatgtcattggggctaaatctctcaggatggtggaaaattgtgctcctacctgaggccatgttgatgtctgagggccacattactgctggggccatactgagtagcctgcactgccacccaaggccatggttcccttcttctagtcaacttgtcaggatcctcctccatctgggcacacctctctcctcatctctttcctgtctcctctgtgggaggagtgacctgacagtgacctgcaggagaattaagtggatgcctctcctgtgaactctttgagatcaaatgtcttttatgtcagtgtctcagattttatgacctcagttctctcagtttctcatgtgcagaagtgcagctaactcatctcagtagtccatctgaagagtagtgcttggctgctagtgatcatgtgggtatgggtcccctatgtaaccttggtaactcagctgatcagccattccagcctcccaaaacacagatctcagtgatggagaaaagcattttatttatacaatttagcaagatatatattagttttcgtacttattgagtatgtgtctcagcagtgtctacttgtgaaaagtatgtgtaatctacaaatagggtaattgtctatgtctgctcaatgatgatgatttaattctgaatatgtaagtcattctaggaatatatgccacaatataaggtacaaattggcatctcacatggccaaggctcacctgccccagggcttttgagaaaaggttcatgatcttcctattttggatggcgtggagattcatctagagaggttgagtcggtgccagctttggctttccagctgcacaacatgaggagtggagtgtggcactcagcaattacagattgacaagttggtttaatatcaacttcactgaggacttcagatacggagttgtggaattgattaagtaatacagcattacaggccttaatggggttgggtcaggaggaaggtttcatagggcatgggacattagggttcaactttggagcccttgaaaagagctgatatttttacctgtaattgtgctggaggtggggcatctctgattatagcttcagacctttgaatgtgtctggagactggggaaaagctttagaattagcagaagaaaatgaacatgaagacaaaagccaataagtggtcacggagctgccaggagtgaaggcactaacgagacagaattagttcctactgacaactcgaaattgcctggaacattataaaaatcaatcagcctgttcaatgaggactcacagtgaccactggatagtgtgatgcttgcaatttgtctggacacgaatttagagaagccaggagagatttagcctaatatgtagcttttggctggtcctaagttttggagagatggctcaaaatgagcttcaaccccagttatcttttcccagccatcttaaagccagaagaactgaaattagttgattgctcatttctcttacccaacctactgtcattttgctgtctttaccaagtataatatatacattttagtgttttctccattgaattttttgtggcttatgattctgctattatctccctagtggcttttaatgctatcattatagacctcagcattttgaattcaaataagtataggaaaatattagcctactaaatttattatttaacagatgtgatgggcacagaaggcatttgaatcttttgggagaggcagatgagtaaatttataattgtagaagggtgaaaaatgtggcgagtggggttgtctgatcacacacggtggtagctaacttgacaagacaagcccttttgtcttattaattgtgctgtagtttttatctggagtgtcccccggggccagtgcaccaaggacttggtttccagcctgtgatattttttgggagtgagagaatctttaagatctgtggcttgttaggatggagttagattactggaacagtgcctttggagaggcttttgggagggctatcttctaactactaggaagagaacagccccccttctgccatgatgttccatactatcatgagttcaaaacacagcaacagaaagtgaacacaaactgttcattaggacttaccacttggtaaatagttaataaaaggttccccatgtacatacacacatggacacacacacacacacacacacacacacacacacacacacacacacacacacggggaagagaaagaaagacagagagagagagagagagagagagagagagagagagagagagagagagagagagaggagagggtagcataatgcctgaacgctaacagcaatcctaagtagagatggagaaagggataagcaaggcagtgtatttgaggtcaccaatagtcacagtgctgagatgagtctcgtcactgagaagtgagtcctgggagccctgtggagtctgtggaagttctcacacagagaaggtgcttcctcacaaatgtttatcacatgactgactgaaagagtggactacctcagcttaggagatctctgcttagatgagtagcttagatttcactgccatctatggaaaggagccaggatagaacacacttcttgaatggttactttgttcaccataggacatttggcagtgtaagtcagtatggtgtgggatttgttacctggataccattgcagaaaacagcctgttgctttgccgtttagaaggtacagagcagccttccttcccatcccactgtgagaaggagaagcaccttagaagcatgtgaggtggccagctgacttaaatgataacttcaatgtagagagaaaatgcagcttcattattgtgcctggaactcagctggtacctctcaagaacccaacttactaactagcagaaaaaaagcaatatttagtttggtgcagtttagaacttggtacgtacaaagattatcaaaagtccctttagatcagtgattctcaacctgtgggttgcaaccctttgcaggggtcaaatgacccattcacagcggtcatatatcagatatcctgcaatcagatatttacatgatgattcagaacagtggcaaaaattacagttatgaagtagccatgagaataattttatgtttggggggggtcaccacaacatgaggagctgtattaaagggtcatagtattaggaaggttgagaaccactgccttagagagtaggcagtcttagagtaataatctcatgggtcttccagcatagtgtcctgattttcctgatctttaatgccccagcttgtggggggagcgggaatctggataccacctatgactcaaggcatgtacagatttccttgaaatactctggggccgaggcaggtagatgaaatcatcttttttttttttttaaacagtgtggctcagcaattattttcctgatatagttaggttccatgtaagattttgagaaaggagtcttctattaaaacacctgattagaaacactctaaggcctcctacctaggaatgtgacttaagggtgatctgctacacatcaggcattttaagctcattgtgacacctgttgctaggttttgttgcaagaactgggctggccaaaccttttagtcgtgtccaattttgtcatcattgtgtagatgtggggaaaatctttccagcatggccaatatgttctgtacaaatgtatcaatttctccttaaactgccttccgaagggaacataatagatttcatggctccaatggcgagggaaggtgctaactagccacatggctcagagtacatcattacggtaactgcttcctgtgaggaataaagagctggcctcggagccttaaaattcctttttttttttataccgacaaaaagagagttccctacttgttctgtgaatcaagcatcttcagtaattctttcctgtgttgctggagtttctttgataatttccccctcatctctcattttacatgataggtttagaagaccgttattagctaagagaaggcttaaacggggctgaagaatcataaaggttattaataatttctataaatatagtagcagtcagtgtttattaggacttggggtctaagcattgcttggaacatttctcctttattaactcgaatccttgctacattatgaatatgtgggaagtgaggcctgaggaggttaagtgtctgctcaagatcatacttggctgagtctgattcaaacccagggcatcagctcccacagtcccaggtcctaactagtatgcctgataagaattgtcattctttactccaggctattttctggcctctagcctgattgttctctctgctttaatgctttctatgttatgatcatccatctgcctgcattaaaaaaacatcttgtcatcagtgtcccaaagcaaagatttggaacatgtagttctttaaaagcaaggcataggctgggctgcagctcacttggtgacgatttgcctcacatccgacaagccctgaatttgatctcctgccccaaataagctggttgtggtagctcattccctagtcccagaatttgggagggaggaggaggatcataaattcatggttatccttgactacatagtgagtttgaggccagcctggactgtgtgagacccagtctcaaaatgaaaagaaaataaggcagattatagcacactgatttttagttcatgggagttttgtggaaagccttctagtcgaggtcattcccgctcatcattttgtcatagactgtctaccttagatttgtcaccatgttgtcatggattgtccaccctagatttgtgtggctaaggcatgagttaaaggggacattgagtcagtcatacatttttcaaacattgaaagtctacgattgctaccacaccagcgtttttgccagtcagagagatgtacacccatctgttggtgattgtttgaggatgtatttggtaaataaagggtgtttagttgtgaagcactgtgtggcaagcactgggcttggcattttatgtgggatctttgtgtcttctggttcttgcgggaagctgttgtagttgcttcgatttggtggatggatactgaacttcagaggaactttctgattccgtatgtagtcaacagaaagcagagttagataccaacccctcagtacatggcagaggagaaaagtcaggtttagtgagacttgtttattatgatacatctcccagagtccacagaaatgaagagctgtgagttgtcaactacattccatattctagaagacattccttgaaggggtgtgaggctggatgcatagttctctgaatgtctatagaaggattggttctagagtctactgatctagaagatcatatttgctgccttgaaaaaaattactataatttctaattcactgactataatagtcatctctttaaaatatatgctagtgacctcagatatattcattctaattctagagcatttttatcaaccccagagaagcctcacacttttaaactccttcctattctctccatcttgccatgcttgcaaccactagtctacttttttgttagtttgtttctggatttgtctactttggattcctcatttaatgtaatgaattggcagtttattggtgttatatgcatcaatcagtattttaatttttgtgacttagtaatgttccattgtatgatatatcatgtcatatttagggtttggggaagataatgcagacagctgttgtctttgtatgaccccttccttgtttggatgccagttgatcgtgcgtgcgtgcgtgcgtgcgtgcgtgcgtgcgtgcgtgcgtgcgtgcgtgtgtaaaacttgattcttaggtagagctggtgggcctggtacagcccttcagaaggttggttctagttcaggcatgtgaccaaaactttgggcttctcagagccagtctacttcctggctggggttctggggagctgggatgcataacactgtctacagtgaaacatttaaagatttagatatcttgaaatgtctggcctctatagagaacccagattttactttaggaaacattaaatgtgactcttttctatcagatgctataaaacttgtgtttatgacaaggaattaaagtctttttgtctcccatcttgtaagacttttatgaaatattttaaggttcaccccaccgcaccccgcaccaaaacctttgttcacacaaaggtgtgacaccctcccccaacttcctccttcatttcctttgtgctgattcttttaatactaaccatctcaaaagacagtgaggtcctacccacccagtggggaaaagacagtacctgtgggagaattaaaacacagtctgctttcctggaactcttgatcaagagtaaagttttaccttgctgagatactttcattggagcgatggtctctttctctgtgtcccccgaacttacttctaacaaccccatgcttgatgtggctatttctggactatcagttatgagtcaatcagttcctgtcatttccactggaggtgggataaattctggctggctactcctgagttattcctgaacaaaaagagccagtaatgtagagtgggggtcagcaggcttatagttgtcctcccaccccaagtatcatgtgttttaaggaaaataaatagtgtgactgcctttggcctgttaatctagccttagcctttcctgccaggaaatgcaaaccacatgggctgctaataaatgttgttgtaaagttcttcctgcctcagtgaaaggctgttccagctttcttcaggtttatatcacaatttattgtgcatcagaaaacctgagagagctctgtgaaggatattatagcatggaaaataacatagttttgcaaaagtcagatttatttttccctgtatttaattttttcatataatatatattgatcatacaccagcttctggagacaaaagtgggaagctttaacctcaaaacatatgctacccatccagcaggtgtgagagccaaagtttcatttaaaattttaattaccgtgcctaagagatccatgaaacaaaaatgcctctgatctgcaagtcccttgcccaaggccagatagttcctgaattctggaggctattgtttatgggagccacatcatttcactcccctaaacaggtttttttgacctgtctgcacccatctgtgcttgatcacatgtgggcagaaggttcacaggcagaaaatatgtcaggatgtatgtttgctcctgattgaaactgacagaaaacacctgatcagctacaaaacttgattcagggacatttttttttctttttgggacccagagatggacccggccagagcccatccacctggccagtacttaattaaaggttgcttcaaacttagctttaaactgtggtgtagtggtcgtagtcttatatttttggttgtgagcctagcctttaatggctgagccatccctccagcccatggtcttattcctaattggtaggattaacacaggtactaagattctaaatcatctaaaataaagatgattgcaaaagggtatttgtttgtttttactcaaaccgtcagttctagaaaactccaccattttggaagctaccgaggtattaaaagcagcagggatgcttgcctgatcaatcttggctgctttggtgcagacacttggagtttcccatcattttggttatttgagttattcaatattattacaggaaaaggagcaagagtggttggatggcctttgcataatgtagggccactggaagttgcagggacctgttgacccttgcgtaagactctctggctctgctcggataaggggttgggccctgagacagaggcacattcatggactttggtttccagtggaaaaaggaacaaacaattgaggatgccatgcaagtgagggaagtcatgcgtgaacagaacgacttcagatggggaaggagtgcagaagatattgtatggaggaagaccacaatgctgggtgaagctttgccatgagttcacctgatgtttttttttatgacaagaggccccggtgggttgggttcttggccataggaattacaacagacttagcagccagtcagtcattagtggggaaatggggactaagcactgaacgtgtgatggacaggctatgttcaaaagctgttcagaaacaggctgtattgatgtatgcttgtgatcctggcactttcaaggtggaggcaagtagaccgtgaattgggagccagtttgggctacatagcaagaccctaattccaaaagccaaaacaacaatcacagtgttgttcagggcctggctcctgaagtgtggtgattagctccagctttggcaacttagtattggaaatacagactctcaggccctactccttaagtgttgaagcatctgctttttaaaacaaggtcccaaaaataaaataaagtctctcaatgctggggatgttgttcagctggcagagtgctggcttagttgaatccctgggcttgatatcaagcgccacataaaacatgggggcttatgctatgtctttaatcccagcaccgaggaagtagaggtagatgggtgaggagttcaagacagaggctagcctgagctatatgagcctgtcaaacaaacaaacaaaacaccctaaggagttaggtcataaattattgggtgagatatggacatcagactatgcctccttcaaaggggaagactgtggagctagaggcaattaagcagtgcaatagaaatggcatctctgcacttttgcaggcaggatttgcaaacagcaaagataccctgcctccatctcttccagggagaacacaagctaactactgatgagcattttggaacctcagtggcatggagaagatgccagaggaactttattaccaaacgtaactaattagtctttatataccaccggtgtctttccaagttgctgaccatgtgacttgatgtctttcttttttttttttttttaaatcttgtctctttaaaaaaattaccattcgttttgaagatgttacattaaaaactgctactcaaatctccccccccccagacagggtttctctgagtagccctggctgtcctggaacctgctctgtagatcaggttggccctgaactcagagttccacctgtctctgcctccccagtgctgggattaaagttgtgtaccatcaacatctggccaaagctcccctttatgaactattcattcttagggtgtctcctccatctaatatatatatataatatatatatatatatatatatatatatatcatgctagtggacttctgtgtgttgttgccaggttaaacttttgattgtatgtccatagctccatactcatggggctcattgttcctccaactgtctagtgcagaaatgccatacaaatttgatttgggtcattcctgtatttagaaaactgaaacagagccctggagtaagtcctgtagcccttaggaccacattccatgggatgagaatctgaaactcaggcctgcttgtgatcacccccgccccccagcgtccagaaggttctaaggaagaagaattgcttggaaatttgggaaaaggaagcatgccaggtatgaaggcttaacaaacaaacacacactgtgtcctgtaggtgctggaattgacaggtctttccaggtaaatctttgggtgagttcccccctcagtagggattcctgagagatggtctgtgttccccctttgcacaagctaggtcaggggttaggccggtgctggaggagtgctgaccctgcttaggggtaactggccggaaaaggtggttagtggaagcactgagggcaggaggacaggctggcttctgctattcgctactgtcacagactcctttggcaggcctggtttcttgctcataaatacatgtaatgcagactttctggaagtgttgaagtcctttcaagggaaagagaaagcatggcgctcagttgattgtttcctcttcggttgccccccattttaagaaacaaggaggggagatgtgagattaaacatctgttgccagggactcagtgggaacagcctctgacttcatctgagaacattggtttccacaactgttgcaaaaatggtaacttttcataacaacaacagaatgtcaggatgtgaaattgttgctacactgctccaggtgtggggagagtaatagtcctgcatggcctctgactttagcttctagtgtaagtgctatgtatgagtcctgtttggaggaagcctttaggaaagtgatgctgggccagctgaagtcctgtgtgcatgacaactgtcagctgatgaggaactctctcaaacttctgttctttctttctttctttattttgaataaagtgttctgtctgcatatatgcctgaaggcaagaagagggtgccagatctcattaatgatggttgtgaactcaggtcctctggaagaacagccagtgctcttaaccgctgagccatttctccagccccaaacttctgttcttgtagtatagtaaaatgcaaaagagagaagacaaaacaactggccctcctatacaagcttaactacttggacttaacacctccagcagctgtaaattgagtgtgttaagtcatagatctcaaaggaggtgaaagtttcttggcagataatgagttgtctccattatctccttcttcatgacttcctgtggggagcctggtagagcagttgggctttctttgacaagcagctgcagataagcaagggagggtttcaggcagtctttgggggtaggctgtcccctttttgatgaggatactctggaggctgtcctgggaaagcggtaacttcccactctgcaacacagaatctttgcatcggcaaaggcagagacttagtttaaaaaaacaaatgaaggaaattccccaaagaaccttcccagggagcaacaaaaacatccgctgtaaacagcaggttcatcttctgacaggttttgtttgcaaatgataacaattacaggtaatttttcatttcaattggaggagcaggtattaaggaggggggaggggcagagaaaagatagcgcacaagctctcccaagtgcctcattcactcccaggtctacaacctgagctgcgtggagggccaggtagtggctccccgttccattaagagatctaattgtggctgttccgtctgttggcagatgcagtttccacataacaacggcccagagacagagctgcgtgattaatgcctccagctgtcatatgccccattatctgtgcatttgcataacttaatggtttaggacaggggagagaggatgcttaatttaatgtttagcaggcccttgatagctgaataatttaagaactgtcaaggggggtcagtcctacaccaattcagcaagacagctatgatttctgcatatcgttaaaattcttactggggagaattttttttttttttaagggaaaaagaacaacaatgcctgaaaggaagcattgatttttctgttaaccatttccttgctgtggcaggtggaagtttgcttttgatagaggctgcttgtctgaagaccactgggaaggcatggttcactcctcttcccctcctctctgaacaaatcctcccccccactcctctgtggacacccccctccccagcgcagtctcttccctctctgatcttgcctccttttgttcccctcaaccatctcaccctttatgccctattttatgacccacttacaatcctcgcccgctctttacctccagcctctcatttagctgaaaggcagatggggagggggaggagagagtgttgagggaagagggaggtggagagggagcatggacagggaggagcataatttgcttaaaatcaactaacagcccaacctgctttcaataggaaacactgtcagtttcattagttgctaatgaatattattaaactaatctgtcatttgttttctaattatgtgtcaccaggcatcacagtggcagctgaggtgactcactagtgaataatgtgtagcgctccccccattcttttttttttttctagagtaaaaacagcaagtgattagcgatcatttcaccctgtgtagtcggtcaccccagccctcggtagtcgtttttctcccacacattcttagcactgcaaggctttctatcgctcagtcttggcagcccattcccagaggatagacctggcccacctcaaatctgagaaaaccttgtttctagactcttagctgatgtgagacaatttcagatgaaccccctcaaaatcttgtgggtctggattttgggcaactcagttgcccagtatgatacggagtaggcagctctgatgcttggctgattttaaaggcccagagggattctgctcaaatgcctgggatggctggacttctaggtccctctctgtgtgtggctttgctgtagtatgagggggcttacttgggggctccaggaattctgaaggccagaagtagaaactgcctgtggcagtggaagcattggggacatctcattttcattacatttaagacagcactgtctgtctgtcacaaagactcagaggtgatgggggtgcagatctgtggctggagggatgttatgtgggagggtgggtctgaagagatggctcaacagttaagagaccaatactgctcttgcagagaactggagttcatgcacacacaaacatgcaattaaaagaaaaaagatttttttaatggaggcattagtctatgctcatcttgaatctgccagctctcactaaatcttgcctctgtcattcaaatttcttgtgccccctcctaacctagttggtcggtatctcatcaatagtccctgttccccctttctgggtcttccaccagaattaagtaaacccacaaactagagcaacctctgcctctgttctcatatttatttgggcttctgagtgtggcccaacaaaaaaagtgggccacatagtggctccaccaaataaagaggggtttgggcctcaaggacatcctcagagctttgatttctttctaattcctggtagtacttcactgccttctgaaatgctcagccctggtctgtcccccattctccctcccccaatctagctcctcacttcaaagcatttcatttgatctctttgcaggtagctttccttctccagggcaggcgtgttccttgtcacctgtacacaccgtattcaaacctcagtgtctgtcgtgaggttctcttccttcatgcctcccttcaactgcacccttcatttccactcctcttttcctcagtcaatcactactgatttttccttctgcacccattctctcagcctataaacttgcttggtctcaacacaaacataactggtgcagattcttttccccctgagaaagggtctccctaggcagtcctcgttgacctggaactcactatgtagatcaggctggcctgaaactcacagagatctgcctgcctctgcctcccaagtcctggaattaaaggtgcgtaccactatatccagctttggtacagattttaaaaccacttaagaaatctgtggtctccctgtctgtctgtctgtctgctccctgctgttgtagtcagattcttggacctactgatattgcccatggaggtcaaacaagctctcaggaggcctttcaaaaaaggattttcagcctgagcatttgggggacacattcagatcatggcagtttatttcttctggctctttctagaatcattttaagacttttcttcttccttgaccttctcccaaattcagtgttctctggagtctgcattgatgtctttcctgttctccttccacgatggctgtggtctgttgtggaaactctagtacaaatggctcttgaataacaagtgtacgtgtgcatgcaggacacacacacacacacacacacacacacacacacacacacacagagagagagagagagagagagaagagagagagagaggagagcaaaatgcacttaaggtcactcactagacatctcgaatccttgactcatgtacaactcacactttgcatggctgagaaggacccggtttccacctttttttttttttttttttttttaatccatccctagcttcaggccttcatcctacaggttccttcatccctctttgtcatccatcaccacacaaacatcttgttgagttttgctccttcagaatgtcttttttttttttttttttgcctttatgttgttatctggtcagaacatggcaactaggcaggaagctgttttcccttctaatctcctctgcttttatcccattatccactcagtcaccagagaaatgcttccaaaatgtaaatcgagatgagccactgacctactcaacatcctgcagtggtcttccactgcctagttatgtgtaaacctttagtcccgcacgtgaaatcctttctgctgcctgggttcacaccctccatcctctcagttacattctctgctgctttgtgcctttgggtctttgcacatgatttatctactgagattaatctctctctctgcttccattaggcagctcttttattcatgtcaactcagctcaagttaaagagagcttcctgggagacatttggcaatgtctggaggatgttttgattattacaggttggggagctcctgattaaggatgctggcaagcatggtacaacctacagagcacagggcagccctctcccacaataggctagagaacccaagtgttgaggttcagaaactctgctttctattagtttgcatgctactatttttttttgggggggtggttcttctttttattatcttctgtatggcacttattttgactgtattaatttgcttggattgtatgaactaaagcttgtcccccatcattttggggatgttttaattctgccatgcccctttagccccaaatatttttgagatcatgtctaggaagcttttctttatcttggttgtctaagatttataacagtagaaatttgaagggaaaagtgctgatttatttaactcattgtatattcccagcaagggggtgtgtagaagtctacaaacaacattttaaaatcttcttgccagatagcttctgtgtatactctgcaaatgggaggaactggcaggacattaggagatggaaagacagaagaaaacactgctatgctccccccatcccccagatgcagaagtagtagggtagaaggcaatccagactcttgttgctctggcagcttcatcaggaaagcacccatggaactcatctctgagaacagtaatgattacttattacttagacatctctaggtgttagactaagcatgactattgttttgatggcaccagcagtgagagttctgaggcctcgggggcatagcagaataaaatggaagctgttgtgttagctgaccagcctctcttgttggctgtgcctgttccagttccatgccatgaccatccactttctcactctgtcattgcatccaactggctgttttctcttgtggcaaacaccaagaatgtgtgcctaaaatgcaggttttcctaccttctgtccttgatttgctgggagttagcaaagttttgaggagttagcatcatgcttctgaactgatttcagtgatgattcttggagttgcttcggctccaagtcactctctgcagttttctttgatgtgtaatagtttcatattgctgtcttagttgggatacaatgtttttagttgaccagttggttatctgtatctcattggccaatatgaactttagcaaggcatagatttctcttttctcttttcatcacacactgtctcctaaatctaggatttttctggaaacataataggatcctgacagctccttgatgagtgacttaactcatgtgctcagggtgcttttgggtcagttccaaaagtagttagtatatgtctgctctgtattgtcactgtagtgagagtgctaacaggcgacaccatttctctcaacactttagtacttaaagtgttaataacccatttccaccaagaaaacaaattcagagtgttagtaactaccataaggtcataataggtaaaaattgtccaagccagcactggcctcgagttgaggtctaaagctatactcctgacctctgttgcacaggattttcttaagcaggaaaacagattctaatgtccacagcccagtgcatgatgagagctcactatgacctgttgtctatttgtaaagaactataaaagggagcttgaaggctccaaacatcaagaagtgtgtcttattcagtgttctattgctgcgaagagacaccatactatggccacgacaactctcataaaagaaagcatttaattgaggcttgcttacagtttttaggggtttagtcctttatcagcatgacaggaagcatagctgcacacaggcaggtgtgagataccatcccacaccccaccaaggagtacaattgttactagttataggagaagcatgtcataatggaaagaccagtcagaattaaagtcccaaggagcccctacaaggtctatggatattcttagaatatattttcttttaaaaaaagttgtgtatttctttgtgtatctctgtgtgtggtgtaggcatgttcacagacttgtccacaaaggcagtaagagtgtgtccattggcctcttctatcattctcctactattcctttgaggtagagtatctccttgaacctgggcctcatatttttttttggctatgtcggaagctagcaagctccagttatctttctgtgtccatccttctcagagctgggttacaggaatgtgctggatgcctggattatcttgtatgcattctggcatctgacctctggttctcatgattatgcagcaaaaagctttattcactgacccatttctctagccccatttcagtaactttttaaatgcaaatgttaataccacaaaacccagagacccaagaagtatatgctttctgatattgtgtacatgcgaatgtgtgcggggctagaggtcaatcttgggtgccattctccaggatccataaactttagtttttgagacagtttctcatggggacctggggtttgtggattaggctaaggtagcaggtcattaagtcctggtgacagtggtcttcctgtttctgcattcccagcactgggattataaacacatgctacctagagtaaaggattaacagcctacaattcacactgccagagaagctagtaaaaaaggaggaccctaagagagacatacatggtcccctggagaaggggaaagggacaagatcccctgaataaattgggagcatgggaagaggggagagggagctaagagaatgagaaggggagaagaggagggctgcagaagacatgagggagcagaaaggttgagtcaggcgaagaatagaagataacaagaatggagataccataatagagggaaacattttaggtttacagagaaatcagacactagggaaatgtctgtggagatctacaaagatgacaccagctaacaatctaagcaacataggagaggctaccttaaatgccctcccctgataatgagattgatgactgacttatatgctacccgatagccctcatccagcagctgggggaagtagaagcagacacccacaactaagaactgaactgaactggaatctagatgtagagcaggacgagtaagagcgaaagggtccagactaggctggcgaaacccacagaaacaactgacctgaacatcggggaacccttgctccccagactaatagctgggatactagcatgggactgaaccagaccccaggaacatgggtgtcaatgaggaaacctcggaaatctatgggacccgctgtggtagttcagtacttatccctagcataggtgtggactttggaaccccattccacatagaggaatactccctgagccaagacacacggggatgggcctaggccctatcccaaaggatactatagattctgatgacaccctatggaaggcctcaccatccagggggagtagaaaggatatgtgataggtagggttttagttggggggtggtggtaggggaggacaggagggagaagggtactgggattgtcatgtaaaacaatcttgtttctaattcaaattttaaaatatctgagaaaaaaaattaacacatgctaccatgtccagacttttgcatgggtaaggggatcaaattcaggttctcatgcttgcacagccaacactttaccaattgaattacctccactgtttgcttctttagatggaataatattccatctaaaatcccaatcttattgtaataaagtcaatatctgaagactttggtttgaaatgtggcaaatatccataatatattaaattgaaattttatgtgacattacttcgatggtcagttttaattgtcaacatgacacaatgtaaaatcacatgagaaggggatctcaatgagtgctggtcataggtgatgatgtcctatgagccaaactactaccatcttcattggatcagctgtggtcagtaaaagaacacagtggaacctgttgtctgctgacattctctccctaaatgaataggtagagtgggtcattgaaccccctcatccgagggttgagccacttctttgacatttgtatacaattctgacctaattatgttgtcctccagtagtgtaggttggggaaaactaggagaagggacctctatctaggtggctatgggtgatgactttccaatgtggccgctttgaggtcacctacacctgtcagtaaccccgcatctgtactttataagtaagcctaataaacccattggtttctccttgtgaactttggtttgttgttggagccttagaagggggttggagggtgtggtccttatcgcccacagagaaagaattttagcaacagggattgtttagatagggttggcctgtggccagtgatggactaatctgggattatgagttaacataagcaatttccctttctaagttgctctttgccaagggtatttttttgtctcagcaaccgtgaatgagactaggacagatacggattaaaattctatgtaagccttgtactattgcattatatccagggaacgctctgtgtggtgactaggggggagatgactcaattcttgatggttacttcctcagtttcaaagaaaggtagatcagggaaagagacttgttagctacataggagagtctcctctaaaactttgtggatttaattgccaatgaagagcttcctctagctcctctagatcttctgaggagccagcagtcacagaagtgaggggtgaatggggtacttacaggaggtgaggtaatgaagatttgaaactagtctaaaaatgtgtctcttatgatgcctagaaaaggtccctcctattccagtaagaaattcattctccatattggcagtctacactgactagaaagctcctatacagtggcctccagtcactcacacttggatccagcctgtctttccacatagctggtatctgtcagagaagttagatcccccttccatgccttctctctgtgtgagtgtgtgttacaaccagcaacaacctacgttgcttgataggcaagcccaatttaatagccatcaagtttcttcacaagagacctttgtaggaattgagaaaaatgctgggctttttgtttgcttgttgtttgcttttttagactagagattgattcaaattaaaaggtgggtgaaatctttcattctgtagcagctagcagagaaactcagcaaagtgaaaccacttggctaatgtttgctttgtttttagagctgcagggtagtttatctgtataatgaggcaagtacagattgctccaggacctggcaatataagaatagggcccagagacacccaagataaatgatcttccaacctcagaatgggaggagtgactgaaacctacagggtatgtggtggcatcgtcttctaatatctttttatctctttatgtcaggattatccaatccttgcacatgacttccccttcgattgtggtaaatactggtaaattaactttggattggggaagggggtccttaaattcttctagtgagatgacaattgtagggctgcatgccatctttcagattttcctgatttctcaataagggtaaggatataggagtagagatcagcagggaggctgcatggcagccctgacctaggcatgtgttgttccccacaatgttcttgctgtggctcttttgccatggctctgggagtggggaatagagttgagggtaaatgtgttcttattttaggggagaagaagcttctagctcccactgaatttttatttttgttggaaacggacctgcttcacccactggaaactatcaactttgaactagcaatctctaggaagcttctttggaatagcagaataaatctacccttacgtttctcttgaaataacaaggagatgaaatacaaaagaaatgtctgcgctcaccaccataaatcaggcctgttgctgcgatcggcgcatatggtatggttacgttgcccactgctctgagacctgctaatggaaggccatatgcgcttctgtaagatcaaaacacaacaggcctggtttaagactccgcagtggcccaggcatgcaactcacttgcatttattggtttgtgttcctgctttagcactattcctactgccatagactctcccttccctcactatttctttgtgtctatcaggagctgagggggctgagtaattgaaaacttgtgtttgagcttcacggagttctgagtgggcagaggccattggagtgcgcaggtgtctggaatgcgaggcattacttggtgcctcaggacacaacgctctgggcttgcaggctcagctttgtgatacactaattagaagacgctggggttggagtttaagtaagcatggaaagaggttttatggagctttttttcctcttaagtatgggagtgtggactgaaaaaaatgaaagggcctagtgtttacaaaacgaatgagtgaaccagactgcattgctcttattacagcatcggtgagaagccaaggaagtgagcaccgtgggttgtgcagagtacacatttcttctcgggacctcggaacatacgtgcacttattttggcaatagccctcagagtggtgtcttgtgaacatattgtcctctgatttgttatgttccatgcttagcttctttttctacttccagcgagtatcagatagttttgaaaagacccatggtgaatgccagacaaaggcatctaaaagggaagaaatgaagaaataaaaactatgcatgcttgctattaacatacaattatatgtatttttccttttggttattaacatccgattgtctgagacagggttgcactatgcagcccaggttggtgtggaagtaacagcaattcatctgccttggccttactaaaggctggggttacaagagtatgctaccaggctgggcttaattacgatcattttagaaataataataccccatctacaataccaatgaagacctggtttttgaattatttcctgaatccttgttcatagcatctgtcattaggcttctatgtacaccatttggtgtctcattgttaatctgaaggacaaaagctttgtcacgcagtactgtgaacctaatgcatttatttgattatgtatcctgtgccacctcactgctagggagttgctttaaaagtcagtactggggctggggagatggctcagcagttaagagtcctggcagcttgtctagaggaccctggctcaattcagagcacccacatggtggctcaaaaccatctgtaactcccaagggacccaacatccttttcaggcctttgcaggcactgcatgtgtgtattacacagacacacacacacccatacaggttcaaagtaaacatatcaatatttaaccatggatgccaagtcagaataagagttgtgatagcttttgtgggggagctttgtcaacccaagtggtataacttcaaactgtctgtcacggtcttagaggagaacatactgctgcctctttactggactggcataatccctaactgaattgtaaaacttgcacccacaactaagtatagctgtcacccctcatcaaagatgcttctctttgcagcagagattcctatagagacacacaactgctcataatgcagagatcaagtgatggtgggggaacccagtcctggtggaggcatctacaacacaacccctgcatctaaggctcaggaacatcaaggaaagggaggtggaaagactatagagtcagaggaacaggaagtctgctgtgagattatatctcttagaaatgacagggaagctacacccatgataccatagcaatatgactgccaaaataagacctgaacaatggcaatattaatagacatgtttagtggaagggggggatcttgcagggttccatccctagatgaagaactattggtaactaattactgctgagagggggggaggggaaagaattaacctttgccagggatgagtcctctaattgttgctcaatggtacagtacttgcctacgatgtgcaaggtcttagcaatgcaaaacgagcaggtgttggggactattgctgtctgtagtgatttgacattctggaataaatgatgactgctgtagatgcattagatgttacttttgcatagctgtgactaaattgcctgagagaaagaaccactttaagaaggaatgctttatttgactgtggttccagaagctctagtccatggacattgtgccgaatatcaaagcatgaggacaagcaccacctcttgacagatagggagcaaagagcttcaaagggactggggaccagaataaccttccatgtttatgcctccagtgattgacttctaactagccccttctcttgaagtttccagaactttccaaagtagcatagccaggtgacaagttcttaacactgcagagtacttgacaggcacacaggcctgtggagtacatttcctagtcagacatagcaggtgtctagaggtggtagttagtgctcagtgcaatggtccctcaacccgagtgattgtcagaatgaactgggagaattgacactaccagctaccagcctcccatgtcttaggatgctgactcaagacataggatggagttccagggatcttcctgaggctattttgatgatgccccttagtgtagggaaacaccacttagaaagatcttgccctgcatttcagttcagattttttttttaaagatttatttatttattatgtatacagtgttccatctgcacctatgtctcaggccagaagagggtgccagatctcatcacagatggttgtgagccaccatgtggtttctgggaattgaactcaggacctctggaggagcagtcagtgctcttaacctccgagacatctctccagccccttggttcagattttgcccttcattttcctttcataggcctgagaatggagtgttccctccccctactgttatgtaaaagtcaaagtgctgagtgctgggatggatacaggacagagtgctgggatacagagagatcaacagggcagacacactggccaaaccagttttggactctgggttccatgtcttcagttagagcaaaggttggtgaggtttctgctgctgttcagctccagtagtcaacgatcttgaggagacagagttgttgatgtcctgacgtacctttcaatttcatgttggttcttcctgccaaacttcaagtctacctcacctttgacttgaccccagaacaacagtcttcagtgctcttggtcacctgatggaaacattaagcacaagattcccacttccttcagaggctgctgggatgagtggattcaggtttgatcaagtcttgccatgtttctgtgatagtacaagatgaaactgctgcaagtgacagtggtccctcatctgcatttctatttagtcctgtcagaagctctagtggaactagccataagctccgaagacaggtgaatatgggcaaatctggatcacacacaaggcggtagagccaagagaatgggctgctttcaccccatcctttaggcttggattggggtgaagagaagacaatgtcagagatcaggtctgatattagtgtagagtaaaacacaaaatacacttccctcatattaaagagttttcatgagattttgaatctagagaatgaattttattttagcatttatttatttatatatttgtgtgtatgctgttggtgtatatagagaggtcagaagacagcatttgggagttggttcttcccgtctacttgtgggtcttggggattgaactcagttatcctcaggcttgttggcaagtgcccttatccactaagcctttttcctggcctgaaaaagagcataagtcagttttctttgacatcatattgggatctactcatgaagatattagcaaagcatacaccactttttaccactttttacagccaaggaactatcccctgggcatgtgaattcattatttccattgttcatcagaatgaggcttcgatgtctctaaattgaccaagcatcctgaaattcttcttcagggatggagacaatgtaagtcaaggaagccatttcttttgggtattcaggctaggactacacagatacttccagaatccagtgttcagtgtctgttactgaggtagatagcaggcctaatgctaagacttacttcaacaaaagttgaagatgaagatctttaggttgtcaacaattcaaattacacatgtacccacactctagccacatggtactgcaggtagtcaggtttccatgcttattacactggaaggagcagatggttagaagctaagggagctcacacccagaacctctgaagaggcaatctgttcttatgatcattgtaatggatgacaagttacagaagctttaggttgaaaacagatgagtgtgtctggtgtaactatcactctaatgtatggttggagctgtaggatctgagttgcaagccttcagcagggctgggcctgcaacctgggcagagtagctcagtgttggaagttccttgggctcatgccatgggaacagtgtagaaaaacatcaccatggcctttccaccgggcggtaattttaacatcttaaaattatttttaatcttgatgaaggtctaaaaatttaatggggtgtttcaaagactcaatagtttttgactagtcacttgagacattgttgcgggtgaccctgctccgacaccccttggggaaggaggtaagaagacgcaacaccaatgacacaggcactgggagtcagtgagtagcagagcatgatgcagactcatttattaaggaagttagacctgcctttaatataccccatctcaaagtcccattggctcagatggctgactctgctgcattgtccttttctcattggtgtctttgtcagcagtctctgagtgtagaggaaggcttggttcggggaggaagtgcctgccacgcatgttcatgcaggctggcctgggcacctgggcagggtgactactgcttgggttggctgtcctgcagtgtctccaaaagggttatctccccatcactgcctaactgttaggttttcttttgccaagaaagtatctattcatttatatctcaagttgttttagaaaatcaactgggtgtcatatttgttgcagttgaggttaggcaaaatcaaatgtaacaccataattgaacatttctttttaatgacctaaaagggattatttacacagatgtggagaagaattgaaagtgattctatgttatgctagggctagaaatagtagggcatatgttgagtgtgaagtgtggctggtagaggtaggggctcctggagtctagaggttaggcaggctgtatagagaaaaggatgaatgaaaggagacagccagcttatggagactgtccactggggaagccaatgcaaccagtatccctcttccatcctcttctctcttgtctactatctggcctgtctatgggccaaggccaaatggaagcctgtcagtgcagttatgttgacagcaggatagagagtgggagtgtatatgatgtacaacagaaacaacctagcatgatgtttctaatactcagtggcaggctgggtgtgtgaagcacatacctgaatccaaatattgggaaaactgaggaaggaagattgtaaatttggggtctacctgagctatgtagtaagactctggctaatttttttttgagtgttttatagtcaaacacaaaccacatgtgtgcatacacaccaacactctcacaaaaactcctcccccaacatataatgaataacctccagatacagttatgagatgttagtttggtctacattgttcagtcaagtatattcctgtgccagaatattcaaactgaactttcagcagaagcatttggataaacattattggagaaatgaaatatatttcagaggattaacttcatggctctccataaaattcaacaaatatttattgaattcttcctgtgttcccagtgctgtggtcacctctgagttgtaactgaggtaatagtaactgatatttatgttgagttcagatatgaataccttttgtttgtaaacttggacagagtgcccatttgcccttcatatgtggtgtgcagtgactcttttataccagtgaccttggcgcatttctctaggaagaagattctagaaacagaccaagtatcctttaaaaaagttcaatttttgttgatgcagttttatttatttatttcgagttgaacaagcattaagactacacttacagtttcctcttgtaagtggaaattaaatgacacaccatataatgcatgcatgcccccatggccattcctaacggagatgatctcatctttttcttattcctagactttatccttgtgcagatactatttctacaagtcaagaggttgtacttgcaagtgaaagggaccaggtgtgatatcatgagagcatttgttttcacttccttgggcactctgcccttctccagaaggttctacattcaggataactttgttcagggcatgcaatgcctgttctcatcccagctgtcacagtcacctcaggctgtcgtaatatccaaccaactttaaagagcagcaattgattttgatagtccggtgactggaagtctataatcaggatgcctgtaccagctctgttagaacttctgtgtcttcatatggcccctccattacacatggcccttgcattatgtctgtgggtagtaggaaggagggaggcgtgtgggggcagagataatgggggaggccaagcaccttgatatcctttcatataaagatgcaaattgtatcatttgggatccactctgatgacctcatccaaaattagctgtctctagttccatacagcactatcacgttgggagtgaagacttccacatatgaccttgtcgttgggggttgggagtggagcacacacaatttagtttatagctctgactttggggacagggactttcttcctagttatgaagcaaatgttctgctttctttaaacctatacttatagctagaggatgcagcaaactcacccccaccccaatgaatagaatgattgcctcaggtttgtggatggagataagattatgcagattggcttgtactgagggtatggatttctacctaagcagcctgctatctggagaggaaggggaagaaaagtctgttatgggagcattgtctattcctttatgtttggctatccagctattttagtgtttggttcttatccaataacacaactaaatcagctttgaaacttttcaataaaagtgtgttaatgtcagattctcagaatttttgtctgacatgcccagcagtggatgctgcttaatggacaaaagctagtgctactgaaactgggtgttctagaaaatcattattacttcagcatcagagcccgtgtttccacacaagtctccctataaggaaatccagcctcagcttgacctttgctctgctttctgtagtacatgttgatctggagaatgagttagtagatcacttaaaaaacccaaggctctaaccttccgacccgaagtagaagtgacggatagcttcggattatttatttatgggttcctacatgactaatcaggtcactggggccgggtttaccacaattaagatggattgccacttatattgaggatgctggactctaatctttaagttactgcttttgttgtttccagtcctttcttatttacaacccttacccaaacgtgcatttcaatggagctcttgctccactgaaggtgatggatatcacactgggtatgcaggaaaggactgtctaagatgtgtttgtgttctttaaaggactagccacctacaagtgcttgcaaaataaccgcatgtgaagcatgcagtggaaggatagtggacagacataagacagacagcaatggcctgcgttttctgggggacttgggagggaggcatcatttggccccgggctgtaatgggtaggaggggcctgctctggaaacagattggaggagaaaagcatttgcaatgggtggggataagtgctgctatggtgtgtgctggggagcttgggaaatgcaaggaacaacaggcatacctctgcaaggggggtgggtgaggagttactatcgatagtatcagttccgacctttatacttgcactttaaaatgtttatctgtttacttatttgtgtgagagcatgtgtgtcctggcatgcacgtggaggtcagaggtcaactttgaggagtcagctgtatctccttccaccatgagagttccacatgtcagatttggtgtttttacttgccgaaccatcttgccagcctcctttgtttgttctaggttttttgtttgttttttggtaacatatgtattgttgggctactaagaagtttggaagcattttagagcatgcccagtgactatactcctgtagtcactgcattaacatctccaaacacgaaggaaatagatacggaaagcagtgtcttaaattataaagcgaacccatagttttgagataagtgttttcatggacaacattccagaggagtcaaacttcagaaatactaagatatggtatatttatttttattttttccagttgaatttgttagagcataacgaaacattatatacataaaagtgtacatgtattgaagttctttgtcattattaggacattttttatttttattttctgtggatgagtattgtaacagcatgtgtctgcaccaagtgcacaaattgcctggggaggccagaaaagggtttcccagggattggagttaaaagaagctgtaagccacgatgtgggtgttgggaatggaactagaggactctgaaagagtagccagtgttcttaacactgagccatctctccaggcccctttttgatgctttctatttgcaagtttttataataaactatataaaataaataaaatctatagagacagatttaaaaaaaagatctaacaccaatactttccaaagcatcccacaaaataaacagggcaggagaactagcaagctcattttagaaagtcagtatttctgatactacagctggttctggacatgctcagacacagctaaaagaacaacatcccagagggacgcaaatgtaaaatgcaacactcatggaccaaattcaaggacatattaagaaattacacagtgtgacacgttggtttcatcccagggatgcaaatttgcttcaccatatgcttatcagcaagtggaatacagcacataaacacaggtgctcatcttgatttcagaaagggccttcgaccaagtccaacatcctttcatgatgaaatacgggttagaaatggagagaacaaacctcagcatagtcaggtccatacatgacaaacctgtagcaacactatgctgtgggtggaacctgagaccattcactctcaaatctgcagagacaaaggcacctaactttctctacctttgcttactgtggtgttgcacatcttagctagacaacagagaaataaaaggcatacaaataggaaagtgattcctaactatagaatcatgatcctaaactgaaaagacccttaagaaagccaccagaaaattctagacctgatgaccacttctataaaatagcagaatatgaagttcaacagacaaaattaatagcttttctatatgccaataacaaatacactaagaatggattttttctgctgattctttcactcttgttccaagacaaaacaaaataaaacaaaaaccccacagacaatccaggaataagccaagccaggaatgggcctcttcggagaaaacttgaaggaagtggtagaaccctaaagggtcatgacatctgtgatcatggggtggcagaattaatatgaaaacggctacagagccaacacaaccctcatgaaaaatcccagtaatatagttcataaaagtaggaaaaaaagttaatattcacatggaagcacaaaagacccagatagccatagcctttctaagcagaaaggtcggagaaatcatactacctgacttcaaatcatgttaaagagccacagtaacaaaaacagcatggcactggctcccacacagacatgtagaacactggaatataagacaggacccagaagtaaacccactcagttacactcactcttttctctctcttttttagacagggattgccacgcagctctggctggcttggaactctgtgtagaccaggctggtctcaaactcacagaaatccacatgcctctgcccccaagtccaggattaaaggtgtgctccaccatgcctggctctttgctttgtgtttgacaacctgactacaatgtgccacagaaatgttcttgtctggtcatttttactcgggatttcatttgcttcctgtgttggaggttggattgtttctgtgggtttgggggatttctgctgtactttcaccctcagcttctcaacctgtgagttcttaggtttggtctcttggtaatatcccaggattcttggacatgtggctatttattctccttattgctgtttgaatgcagcattcttttgccctgatggtctttcttctgtgtgagtctgctgccttcccattgtgctttttcatttaattagttgaaaatttcatttccagcatatttatttatttatttattgtctcaagattcagtttccttggtgaacttttcttggatgctgctaacttttcccttttgctgactttttcctaacatgactatttttctcgagagattcaggatgggacgcgcctgcttgtttgtaatcatttttactggtcaacgttgaagtcgtcttccaatgctgcctttattttagcatttttgaactgaaattttaaagatcttgatggaatcacgttgccttgctttttcaaacgtttctgggatttctgggttgtgattggctcatctacttggaagctttggttttatttgaagatctcagcagcagcagcggcagcctctcctaagagcttggtttccagtcccactgtgagtgaagacaaactgctgcggaatcaaaaacagtaatccattcaaaagttaaagttcggtaaaaccaaataaagtccagcaatcactaatcactgcaaaacatgttatggcaacagcggagtgtgctgtgacgataataattatctgggggtaaatgcaaacatagtgagcaactgacactatgggtgagcaacagacagggctggcaaaggggaagatagagaagtaaccaggctgaaagaatagaagccacccttggaagcacacgcctataaccccataactcaaaaatggaagcagggaaatcggggcctgaagctcagctttgacaacacagggaacttgagaccaccttgggttacatgggtctctttctcaaaaaaggaccaacaaactaaaaaccaaagcaaccaatcaaaaagtgaaaaagaggagtgtagaagaatgttgcaaagtagatggaaaaaaaaaaacaagcaattaaaaaaaaactttaaaaatatggagctggagcgaggtggctcactggtggctcactggtggctcactggttaagaatactggctgctctcctagaggacccggatttcagctcccacatggtatagatctttcaacatctataaccccaagtccaggagatctgatgccttttctggcactgcacacatgtggtgtatagacatttgtgcaggcaaaacacccatacgcataaaatacatatgctttcataccacacacatacacatgttgcctcccctcaagaacagattgagcatccttgagatgaaagccacaaatattcaaacctctaaagtttaaaactgattttatgttacgagtagaaaatcccatagctcatctcatgcgtcaggttaaatgcatgcatcctaaagatagcacacaaaaccatatttaggtatgtgcataaggtatgtataaaacatacgggaaatttcatgctcagacagaagtcctatccatgacatgttttgttcatcttgtttgtttatatagtgtatccccacctccactgaagggactcagtgtgctgaggtttggttgtttgctagtggtactactttggaaggttctggaaacttgaggtagaacctgcctggaagacatcggctgttcagggctagtttttgttccatttccttgtctgtccctctctgcttcttagttagcatagcttggactgcttgccttgtccttcccccatgatgggctgaaaataatctgtgagctgaataaatcttccttccttaagttgatcacagcaaggattctgtcacagcaaggatgaaactgactagcacagtatgtatgcaaacactctcaaatccccaaacaaacaaacacaacatatctggttctaaatattttggataagatacttaacctgtgatacatttattatgtaccttttagaataagcaaacgagaaagtttagcattaaccccacaaaagccaaacaatgcacatgaagggatttcagctgctaatgagttggtatatacagctttcttagttttgtaatctgttgtttgcacataagtacattaagaacgtccttcatattatgtgtttcagaggacacatgctgttctaatgagtgattattctgtgacataaaacaaacactctgggctggagagatggttcagtgattaagagcacttgctgctcttgcagaggactggagtccagttcccagcacccacagagcagctcacaactgctagtagctccagtcccaggagacatgacaccctcttctggcaggtacttcacacacatgatgtacacacacacataggcaaccccccccccccaccaaaacaacaaaggactaaatgtcgcatgaatgctgaacctgttttcactttgccttatgttggtggatatttaccattcctcgtggtcattgtctagcatgtggttttggaggcatttcacccctccacatttgtcttgctgggtttaacccaacagatagtagccctgtgtcaggagttagcaagaagaaattcagttggaatgaatttcagttctgtgctccgtagttggggaaagaaaatctcctttcttataagagctgctaatacatacacatgtatataatctagctagtagcaagatagaggtaatatataggcatgaataaagacagcatacaaaggaattgatatcattatatcattttcacacatattacagtcacatagaggccaacctaaggcccaaaccagaacagagtagaacagctggtgaactagtcagagaggctgagcctagataatgagggaaaagttgaactattcctgagccgtttggtatgtgactctacttctgtaactaaatctactgtggtttgcattttctccccttgaaaaccaagtacatcccaagtgtagcttccatttaaaatggcacagcagcaaaaataaccatttttttgcttagaacatttaatggtgcatacatctatcaaaatattacatagcacacattagtatttatgttgttttgcactttttgatcatagtcttaaccttccctcgtctccttccagatcctctaattccaacttcatgtttttctctcttagaaaaatcaagataaaacagaaatacaaaaaacaacaaaacaacaacaaaaaaacctctgttggccaactgctcctgagcatggggccaccctggagtatggttgatatatccaaagtcattccattgaagaaaactgattttcccttctctcagcaactatcatttacaaacagttcttggtaaggggtgggactttgtagttatttcccagtctctgtgctaggattttgcctagctcgaacttgttcaggtcttgtgcatgatgtcatagtctgtgagtctacatgtccatcagccacattgtgtctgtgaaacactgcttcgttggcgtcgtctaccacctttggttcctaggatatttctgccttctctttggcatgaatcaaagtttcatttattttttatgcatattgcctacatgtatgtatgtcagtgtaccacatgcattgccgatgtctgtggaggccagaaggcacagtcagattccctgggactggagttatagatggataatgctgggaatgaaatctgagtcctcctgaagagtagccagtgctattagctgctgagccatctcttcagctatgtacctctcccataattctttgtgaacacccaactgtgactccccgactccggcatgcatgttattacaattacagaatgaggacatctggagcagggaatgcttcctgtgtctccttgaatggctttctatattttgtttccactggccttgaagtactcttattgacaacagcaggcacctgggtccccttttagaaaaactttctcgggacactggcttgagacttcagtgactgaacactgactgaggtgttgaccttaagccatggcaggctgaggaaggagatggaagtgccttgcctcagccctgaggcagagctttcccgtcagagtgtctctgaggagttggagccaagctgccctctgtggttcatctggcatgattcccttaacttggctttcccatcttgtgccacttcccttagtctcttgccaattgcccttaggaacatgtgtttaacaaaccagatgaacaagtcacaggctgttctagtttcattttgttgctgtgataaaatgctctgagtgtaagcaatttggtgaggaaaaggcttatttgactttagactctcaggccacaatctatcattaaggtaagtcaggcagggcaagaacttgaagcagaaatcatggaaaacagcggcctgatggctgcccctctggcttggtcacaggctggggaatcacttgctgggccttcccatatcaagtaataatcaaatgtactccagacatgcccacaggccattgctaggcaatttctcaatcaaggctttctcacagattactctagatagaccagtgattctcaacctgtggggctcgactcccccccccccattggagctgaatatcagatattctgaatatcagatattcacgttatatttcataacagcagtaaaattactgctgttatgaaatagcaatgaaataattttatggttggggggtcagcattgggaaggttgagaacactgtcccaggctgtgtcaaattgacaaagcgaactaggacaggactgtgcgggcttgttttctgttatcacaagctggagttaggaggaggtaacttcagttgaagtcctcctttatggcctatacttgagttcctgtctccacgttcctgtcctgtttgagttcttgaaggagttctgcttactggcttgctcatccatggcttgtttagcctgctttcttgtagcatcatgacccagaaatggtgccagctgaagtaagctggattctcttccactagtcaagaaaatgcatttcatgcttgcccacagaccaatcagttcaggttcccccttcccaaatgattctagcttgtgttgagtttacataaaactaggcagcacaactgatcctttgccaacttgatataaaaatgcatcgttattcaactataacctttcctttctcatttcctcccaagatggtatgttaatattaatatcacaatataaactacttgaccttctaaaatcccatagtctgaaattcagtctctctaacataccaagtttttttttttaatccaaagcgtctctaaactttccaaactttcataactatggctttttgtaaaattaaaaataaattaaatgctttctttcaccaagaaggaagaatcagtacacagtccacaatcagatgaaatcaaaaccaaagttcagtgtaaggctcagtgtcaaacttctggaactcacaatgttctaggccctgaagtgtttgctacggaacatacggcacatcttgtgagttcaggctggctccacttcacacttgtgatgctgacatttccaaaatgctgtggtctcctgctgcaaccaggctgtattttcaccaatagcatttcctggtctctcttcagggactctgatcctgacacacgatgccaagcctcaacttgactccatgatcccttcaatcctacttttttaaaaaagtattttatttatcatggtttacagtgttcttcctgcatgtatgcctgcaggccagaagagggcaccagatctcattacagatggttgtgagccaccatgtggttgctgggaattgaactcagccagtgcttttaaccactgagccatttctccagcaccctcaatcctaaatttttaaatgcaactgaagctgtaccttcacagattgcctcttgagggactctactcttgacatatagcgtgaagcctcagctgctctccatgaccttttcatgccttcaaaaccagcaccacctgggtgactcttaatacgttaccaagtttggcagccaaacatgagtagagagcctcagccccctctggactatagcttctgtctgttgcctctgaggaaatgctcccagatttgtagtactcagtgatgctagtctcttcttaaccactgctaatttcttagctccaagtaaccaggatcagttgccccagtaaaaccaaagttttacttcagtactgatgagcttttaataatcatagctaattcttcagttcccaccgactcagaaccacagattcttaactcaaaatatcacacaacctgccctgatagtcgttacttctttctgaaactcacaagctgacttccattgtttgcatttctctcagcattcttctctaagatcccacagagcagtctactgagctctgagcactcaatggcttttttttagttcgaaattcatatgccacacagttctcccaaaaatatgtggtcagctgtatcacagcaacacccctttcctggtactagtttctctcatagttagggtgatgaaacactatgacaagaaacaccttgtaaagaggagagggtttacttcttttttttctttgcattccatctttcagggaagtcagcgtaaaacctcaaggcaggaacttggaggcagggactgatacaaaggccacagaagggtgccttttactggcttgttcaccatggcttattcagcctgatttcttatagtacccaggaccactggtccaggactggaaccacccacagtgagctgggccttcccacaacaatcatcaatcaagaaaaatgcaccacaggcttggcttgctcatgggccagtctggagtggggggcatgttctcaattgaagtaccttcccaaatgactcttgtgtcaagttgacataaacctagctgaattcaagtcatatctcataggctactggtgatgagaaaaccttacattatcacaagtatcagtcgctttttacaggaataattttttccttatttatatctctttggaagtgatactttgatgaactctaaagttcttatagaaatgaatgtggaacatgtaccagcaagccacatgtcataggtacttctgggacgctcagatagaagggacaatttcttgaagcatctatgagtattgactcttaccttgtttgtgaaggatgtttttatcatggtagtacccatgtcagccttcttatagcagtactgtataagaagtcatgaggctgatgggttacttgtgcatacttgctccctgacttatgacactataaactcatcatgagttgaaaatacatttccatgcacaacttactgagtgctatagttccacaatactgagctgtggagcttacaagttttctcttgtggacttgaagctgactggggactgtggcttcctgccactgttctgcatggcagtagcctgggcaaaagaccaaaattcaacatttaaacagtgtccactgaatgtatcactttgtatagttgtaaggagtatagatcaggattggatccatttgtcacagactatatctttgtgtttgattcaaaatatcagtacgtgatatgaagccctctttattccacatgttgcttaattttgtagagttgaagaccctaatttttagtgagggtgagatataaacctctagacaggcttaaacttgtttaaagttttcagtttagtggcagaatcctggggttcttacatgtatggccctgactataatgccatttaatctcttagacatacatttggtgacttcttgacatggcaggcccacattgaaatggagatcagtgcttgtgtgttgttaagaagtcctatacagaaatgggatttttctccagcaaggatttatttcccccccttctgttttctttttatctctttcctttcttgtaatggagaatgtcacccaaatccttatgtatgctctgccactgagtcatttccccagcacttcagtgaggaattggacatcgctcctctctccacattaggcaaacatctctccaagggtctgggagcttgtgatggtggaggaattgttagtgttttcctttaccctcaacatgccatttgataggaaggtgacagacatcattcttgaaagtcctgtgactacagctgtgtattgtagttggctttttctttgagcctccagccatcacacaaataatgacatggagacttattattaattaaagctcagccttggcttgagcttcctactagctgttataacttaaattaacctgctttttattaacctatgttttaccatgcggctttttacctttctttcattctgtatgtctgacttcctctatgtctcttctgtgacttgattatcttctacgtcctctctctgcccagaagtcccacctatacctcctgcctagctatttgctgttcagctctttattaaatctgtcatagcaatatatctttacacagtgtacaaatatcccacaacagtgtatctagagacttaggggaagtagatggtgggcatcaagggcttgggcttggggaactgttgcttgatgggtatagagtttcagttttgcaagatgaaaaggttataaagatcacacatacaattaacagtactgaaccttaagtaagacagtaaattttatattgtttattttaccatagttaaaagaataagcagcagctgggcagtggtgatgcgtgcctttaatcccagaatttgggaggcaggggcaggtgtatccctatgagttggaggccagcctggtctacaaggctagtttcaggacagctaagactacacaaagaaaccttgtctgtctcaaaaagaaaaacaaaaggcagcaatgcaaatgcccctgggaagcatattagttatttttgtcagttaaggtttagatccatttatcagggttctgttattcagttatgtgtcagagatcaagaaatggtaataacttaattcaattcctcagttattcaacgtgtgtttgagtgtctactggacctaggcaggagctgtacttgtcttcaagaaatcagtgaaaaaaaaaagaccctggaatctaccctcctaaaggctcaaaaatacattttttcttatatttcaagatggtaaaaacaaagccaaagaggaaggggaggagtatcccaggagaatgggaggatgtgagggagcagacccacagatgtagaggagaccactgtagagaaggtagctgtgagagacatgaagagggggccagtggagtagtggaagcagctatggttggcctggcttttgagagaagaaaaggaacaggactgaatggagaaacagtgagaggtggacagaccagtgggactgtgagttttagggtaaagaatagatgtaccagagaaggatggataggtcccaagaaaggccttcgtgactaaatgggatttgtcaggattgtggagaacaaccactgctgagagtggacggaagcccgtgacttcgaagctgtgaaccagccttagaggatatagggaaggggaggctcctgggaagaaggtggctttctctcttcacagccatcctgtgtctgcctgcttctgaatggcaggggtctagtttgggtgtgttcacctttttttttcctgggtcctctctggcttcctcctaagttcctttcctcatccttggaggtagaggttaagtgtatcctccaggctctcccagagaggtgatggctatgctgattcacagcctcttggctttaatgagcttcctggaagcgcttgtcaaaggtgataacttccctcaggaagagaatcatcattcaccagggagaaaatggatatcttgtggctgtgggctcttaaccaggttaaagctgcaggacaaatgctgactgaacatacttcatgcagggaggaatgagcaatctcagaagagcgagtacaagtccttacaagtcttcatctggggacgacatggaagccagctttctcctccctcgggtgtgcatcagccacaggaggaggagatgtgcggtccctcccatgcaatcttagtgtgaggccaaaacaggaataatatcccttgcaggttaaggtttctgtttgcagttgagacagttaagagtaagtttctgtttgtcgtgtgcaggttaaggtttctgtttgtagttaaagagtgaattcctgtttgtcctgtgttaagtccttgcaagatgaagtttctatttgtaattaagatcctgtttcacaaatagcaaagaccccaatccttaacccctgtttcttgcctttcattgtatctttctaacagtgtacaccagccaactttctcacctctgcgaacaccttatctctcctttaaaaaagacctcaggagctgggtgttggtggcgcaggcctttaatcccacgactcgggaggcagaggcaggtggatctttgtgagttcaaggccagcctggtctccagagcgagtgccaggataggttccaaagctacacagagaaaccctgtctcgaaaaacaaacaaacaaacaaataaataaataaaataaaaaacacctcaggaggtcagcaggggctgctctctcaaatctcaatttagggtgagacagctagctgaccagtacctaggtgtaccccaaaatacagcttgttttaattggacaattgtagatttggtcttttttcctcagggtttccaggtttgtaacattagtacaccaagagcaacacccttctttcttgatttctgaaaatgcccagtaaagaaaagggaagaaaagtcgaaatatggttggtcatgtgaattatggatatggaggagagaagatggaaccttgatctacccaagcagagaaaatgtctcccatagattatagctcctcactttcaccatgggcatcacttaggagtagaatttcttgtgttggctactgttctatgtctgtttaacagaacctccagcctctgcagtttgctatcagtggcactttctatatgtaacaaacagggctctgggaagtgtgacaaagttgctcctggttgagactcaccgacttaatctggtaattgggggaagtcagggttttacttcctatcctctctggctggctggttgtgccagtagatttaaaactgggtggttaggggctggggtgggagggagctcagtggtagagcacttgcctagcatatgccaggccctaggttctgccttgagcaccctgaaatgaaacacaaaccaaaaagctaatggtggttttggactctgcttctggaatagcaggtccactccaagacaagagtgcctgtgttttaagtaacacttcctgtgattcttacattctggacatcccaacataaaaagcaagcctgccaggcacggacaccaaagataatgcacttcctgattgccagggagggagtatgctctccttcctcctcccctggatccatgcaataattagccaaagtaaaatgaatattagcccatgcttaactgccttactgtgcgcttgccagcactgacccagtagtgctaaaccaattattttttgaactttatggctttaaataatcccttgctctaaaattccctgtacccctcagctacttaaccacaggcccctctgccctaaatccttttcttatactttgtagctttttaagcaaggcccctctttaagaagacataatcccttctctgtagaaaacatgaaagaccttgaacaaatcaagatttctccatggagaattcagttaatcctgtgcttagagcctaacaaggaaatccatctctccaccaagcacgccattacccggactaatgcctgacttgaataacaagcaaattattgtgcttttaattgtaccctgcctggtcacaaagcacatctgagagaggaatgtggcggctcttcccgagaagcaggtcaagcctctaatcctccttttcttttcaccttcccctcccccctccagttctttctcttcccagcagcacaagggggaaaaaaagacagctaaattatgtttaaaatgggcgagtctaaagaagaaaaaaggcggtaaatactgacttgggagagggcgaattatcccccgtctctgcggtgtggctcatttgagaacaatcaatgttatcataaccccattaccagagggcgatctttttttaccctacaccaggcttcttgagcatctgcgctattgacagtttgggctgggtaactctttgctgtgtggtgtatgtggtgggtctctcctgaatgccgcagatgttccacactttgtctagttgtgtcaatccaatatgttctaatagggtaccaaagtctcttggatatgggtagcattaccagttatcctggtaaagaactacagaccaaagcctccatattggggttatttgctgcatgggatctttcccctctacacaataaaatcagaattaaaaacaaacaaacaaacaaacaaacaaaaaactgttaatgagggagacaagtgtgtcctttatatatgttagtgccatcaaataaaaagacagtaaagcaagcattgtcatgagttgggaagtggatgcccctgtctcagaactcaggttgcaaagagcatttgatccttgatcagcaagtgcccccaagttcgggaaacttttgaatgcctctaccttgtggtctttggaactgggcttactttgggtgagagaagggtgatgggaagttttccaggataagagccatggctcagaagtgctgatgccctggatagttgagatcagattaagtggtggacctcaagctctttcagacaatgctagccaacagtcctatctgaggtctgaaaatcagcaccatggaaagcgcctcatagcatagacattattcatgggttgcactgcactttgattgcagccttagaggcaaacgttgtctcactctgaggtacaaagaaccagcttatttttagaaacttactagaagctttgttgtctgtcctttagtagcctggagcaaatgtggggtgggaaaacattgctgttaatttccatgcccaatagatggcggtatacatcttcctgagaagccaggcttggcggcagctggtaagacctccttaggctaaggaagacaagtgccactccgtgtcctttggaagacaggcattgcctcccattgttggcacagacagctccaaacaattgtactgaccacacagcttcaagccacattccagggaactgctgactgctctagaatgaatgctaggaaaatgaaccaagctgctaatttgcttgattgggggaggaggaggtggcgagaggaagatcttgagtaacaatgggcatgctttatttttccaacatgaataagggtgatgctattttagccccttttccaactgctacagtaaatgaaagcagccacctaattaggcccgagtcactagctggcagaggaaagattctgcagagaatgaggctggagtgggggaatttggagaaccgagtgtgattttggaggaggagaatgggtgggaaggcaaaggaggccaggctgacagaaggcctttgtagggctctgatgcctgcagtgtgtgggctgagctggccctgaccctgagagaacaagggagcagtagttccccgaattcatttcctgactctgtaaacggagggggaaaagcatctgctggaagacaggtctctgagttgtttaaaaaagtgttacagattagatgaattggcttgggagagagagcccagcttgggtgtggcctggccaccctgctggtgggctgggctgggaccccacagaaaggctctctgacacacaaaagacaagtttggctgttggtcaggaatgaaataaatgcctagttagagtggccctgactaattgcccttctctagcaggacacatgagccgttcccacaccagcagcagcaggaactgcagcaaaacaatgggcaggtaggctctgttgaaatcttccacttggaggctccatgaatcgaagtgctaatttatttgttcagtgatgacttcttgttttttagttcgatatcactttaattgaaatacttcactaatgcgatttatcacaactgtaaactgtcagttttcacagctgttgcctttttcaagcaatctggcaagtgtgtatggattaaaaacacaaacttggaaggttgagaaggagccggcacaagcttcttttcccactcagctggcctacagccccccgcccttcaaaaccatatgctccttttctatagccacacccacttcaattttgggcacacctgctatgtttggctgctagatgtccatccttcatcttctagtgcatacctggttttctttaggggccatgtctctttaatggggtggacttcagtcttctgtgttggggtgggcatgttgtccagatgtgataaaaattcttatcttttacccattctggcctcatgattgagggtcttttttttttttgccagaattagctaaataacagtcataaaactgaaatgagacccagctaactttgactttcagataagtgagattatgatcttttattataagtgtatcagaactattgcatggaacatacacagaaaactgttgcctatctggaatttaaatttaatgaaacactatatattttgcctggatgctattggttcctaaaatcgtatttggctaaaactggtcaaattagaatcagactaggacttgcactgtagatttagacaaagatgtgctcaaataaagtcaagaacaattggtgggttgctgaagccggaggattcactgttagtggccatttttcctgccacatggaagccaatgccatgaaaagcagatgcttttcatttgacccgataggctgtgcccactggacacagcttctgtttagccaagagagtgttgaatggttatcagacagcaaaactagatgttgccaacagtaaccctctattattgttcactctttcattttatgtgcgccttagttcatccccaggacagtattctcagaagtgagattagctatgcagtgtgagtagaagtaaggttagctatgcttgtgattagaattttgacttgaatttcatacctctcccccgattggttgagtgactttcgtgtcattgtggccctttcggagttaaattttgaggtctgaaagtcaatgaagggacgaccctttccccacagagtggatgcaaagatacaggagatgaaagcatttagcacggggcctcctgtgtagtagataccctgagagggcttcttccttcaggaatgtgctgtatcctgcatggcttggtcctggaaccctgactggaggtggcaagggaatgaagaaagaacagacactaaagaaaggatggacatgttggcacagaaaagctggggccagacaggccctgcgcactctgatggagtaatatgttctacttcaataaaagggctgagtcctcagtgcttttattatgtatatcacaggaggaagagttagctaggtttccgtaggcaagtggtcttaggctgtaaatattgggaggaggaagttgcagttgctagtttttgcacacactgatggaattgtttgtaaacgcttgtccttggacacactgtcaacattcacactcagaccagaggaagatttttgccagctctgaacctgacccctatggggaagagctttccaaatttctgtgggcctgaggcatttgtttttgacatggctctacccaagtcaaaccatataatctactccgtgctatatttgttccttacgtgtttgcccaggtgtcctgatctctgcaggggcattcataaattctcttatacaatttagccaaggtctgcagacaggcgccagttgtaccactaaatgattatttgtacatcactcttcatttcctgtttcagcacaaacctatccccttgtgtgtgagttttctgctcactgctttttcagtgctactatgagtagcagaaccttggatggttgctctgtttctggcttctcagtggcatttactaatttttaatttttgggatatttgcaatgtgtggataagatatttcttcccttgttggccaacttaagtgaaatgaagaaaggggagcaagagcgcttgcgtcagtgcgtgatgctttccttggaattttctgaactcagaggtgagtatgagaccagggaggagttagatgtggatttgcctgtttaatatgaggaatggtggttaacactagtccctttcctcccttcatagagtgcctgatgccctcagggatgcgttggcccaatgactgggtggtgggaatagaatccagacctctaatttccaggcccaggctcttcactggaggttttgtggagccagcagcacacttgtcctcaggggacctgccagagggctcagtttgtctgcttgccccattctgaaactcaaggatgtatgctataccagctggggcctgtgtccggtgggactggaggttggaagaagcagaggttttaagggtctttgggattgcacaaccatgggctgaagaatcaggcatctgcacataaaagatctgtttgttcagtgccccagctgagatataaacctccaggtcggggagagcaggttgagagaagcaacggtcaactttcaaaaagcttgaggcaataccactactccacattctgttttgttctgtattttcctgctccctttataccctcttcttagtcatcttcttttggttaggatggaggattcatcaatgaaagagatcatttttctcctaccctaccctcctctaattctcccaccccacctcctcctgttctgcttgactcaaagaagggaaggaaggagaggagccttatccagtccttagtcttttctgcctgtgagtccagaaagcatgtgaatccaagcattggtttcagtatctgtgagatggatacaaacctatctaccttgtatgtctcttggggcagattaaattaataaatagggactatgttaatttactgatacatgctagttgctgatacagcatggattcatgaaagctagatgatggggtacagcgagtaccccatggaagtattcttggatgcaaaggatagtgatggcctagcaaatctcttcaatgctatggattcacattaacttcagtgtagcttgtgaggtaaacgttatccccttttacagatgtgaaaaatgaggctcacaagatacaactattttcccaagacaacatagcatgtgcagaggcctgtgtccagtgcacccctcccctctacagccacctgctgtaggttagcctgtcctgtgtggctggacctgaaaggggaaccagggagcctagatgtggtatggaaagggagggaagcaggcatgcagagaggaaagggtcagtctttgggctgggcttttggccaagtgtgattggaacttgggaagtgagctggggtcagggacaggtgactggcatgtggagccccaggctgtgagggatgactttgaggggctggaaaggtccaagctgatgtactggaaatccacctttgattgttgcttagaaacaccggaaatccagcactccctttcccccagagcctttatccgttcatttaaggcttccagggtaaagttcacctctttttaacaggtaacagatttctttaaggtctcacttagggtgcttgctcctctgtgtcagtgaactctggtaccctcttgaccaagagtaaagcttagccttgtcaaggcaattcagctggagtggtggtgtgtttctttatgaccctaaacttatttttaagagtttatgggttcatttgggaaattagcccacttgagaaggtacattagattatctcatagggaagacatatctctctctctctctctctctctctctctctctctctctctctctctctctctggtcgccttcggcccctgagtctctgacactcttctggttggcaaaagaactggggaattggagttacttgacaactctgggatggtcagcccaaggaaaatagcaaggtgagcaggagaactctttacatacaccaaagggtcttaaattccaggtgacacagagtcacagatccatctgatctcggcccatgccatgtttgagtggataaaatggcaccaaggtcatatcatatccccctttccaggttccccatgtgctcctagagcaaggcctatcgacagtcattggatgggtaaacctccctcttcccctgcttccctcatggagttcttgctagtaacagcatgtgcctagtggctgagaggagatcagcaccagatccgggtgatggcatccatcattacaatttgtgtgaatccatctgggagggacctcacactgtgattccagccagtctaaccagaggtaacctcaaattctactggggtcagatcaatctctggctaagggaccaccactaggaagacggtaggctcaccttaaaccatgctaatgaaacagatggaataattaattctttatacggggggccaaattcagaggcttattgacttagccattactaaacaggttctccatacccacaaccatttcttattcttatgacagaaagagggtgccaacatcttaaaaagtttgaagacaacaatgcttaaaaacaagaggagggatttataagaaacactaaatgtcttttatatcaaataatataaaacttgtatttaggataaggaattcaaatctttttatttctccaaccttgtatgtaagtgttttacccccccaacccctgtttaacctttgtatacataaggctctgttacatacttggattacagtgtctgactcctttcccttttgtttttcttgcatcagttctttaaaaaccatcccatagtgaaatactgtgagatcagactccaaccaatggagaaaaggcattaactgcattagaataaaagctgagtgcatttcttgccctggtatgcttattcctctgcttttgtgagcagtgcaccctcttgatcaaaagtaaagttttgccttgtctagacacttttaaaaaagggctgggtagaagtccgagatcaccaattcagtagaaaccagggatgtcttaaggccagctcacacagtagaatcttatagacaagaatagatggtttcatctccctgcagctgtccttctgaccctgtgttttctgctttcatctaatatttgatatctaagacctgctctagcccatgtaagaatactagaggctcacttccatcactcctgtgtcctcgtcctcagcaaatagacacatcgctgccaaaaatctgaaggagtcttggtcccataaagtcatgcatcttctggaaattgacattcttagacatctttgccttgtccaagagccttccaggcctcagtgccaccagcactgcagctttgttcagtttgtgcttgcacaagggagcagagctcaaagcatgctacccagtgctatgttagaacagctatggtgttctgaggcccttggccctggcatagagaacccatgccaatgcagacatacgtttgtgagcctcttttcaaggacttttgtgctctttcctgaaggatgccttctcagtttggttttcaataaagttaggtgtcaaaagccacaaccttaattctttccactaagaaaccagattcttgtttcccagatgagaatacagtaactaacagtaaggcccacttccttactctgtgtagtgtgtagtgttgtgccgggtaccactttgggcaatttgttctttccataactcttttttttgcatgcaggattaggaaatcctatgctagaattgtatttctgctgggccaggtcccctaattacataggataaacagtattttgatggctcaaggcaccagagtagcatgaaaaaaaaacaactttcttttcctttgtaaaaaaaaaaaaaaaaagccatcagaaaatcaggccacctgttattgtagcatagatttgttagccctgactaatgtgattctgtgacattttaatgaccctctccaccgcaagaactcccaagtttttgctgcaacctgcaagtcatatatacttactgaccttatacttttattataagttatagtctagaatccgaggaagactagggtaaggacaaattttgtgtgtacaggaaagctccctctttaaaacaattcaagcacacaggtatagtttagatcttaaatgtgtcccccaacccccatcaaagactcatatccttaaggctgggccccagccagtggtagcatagggaggtaagttagggcctagtaagtggaagctagccattgggtgatgccttttcttgatctctctctttgcttctagctgcctgaaggtgagcagctttgttctgctctattccaaaaagattttctgcttcaccacaaagatggagccacgcagcacatgtcaaaatgtgtgtgtgtaagtgttgtttaaacttagtcccagagttaatgctttgttctaattctttgttttctttttttgcttattctcatatgcctcacttcaagttatatttatatatatgaccaactttagatcccaatggagaagtagacattgagtacaatctctacaccataaaaaataaaggcgaggtataatattgtcaaggcaagagaaagctagaagctctggggaatatggggaataataataatgtaagtgaggaatatacatcacgtcccccaggcatcttccgcgcaaatgataactgttgagcttctacaacacagggttgtcatggttttgtgattttgaattgtgggttattagtttgctgtcttttactctggggtgcaattagccccatttcatgggaaaagaaaatctcagctcatcttttgtagtacttcctcctggttcctcagaaagctcaaggtcatctgaaaattagagattttaagcttcacaaatacctacaatgaaagcacaggtatttacagtggaaggttaaaacatcaaacctcagaaggcatgctgggctctgaaagtgacgtgtgcctcccagggctgcatgaatttttccccagcagcattccccgggggacttaattctagtgtattttataggtgcttgcacagccagagatcactttatttcattgcataaataaccaagatcttttgtacattctcctctttccctctttgagctgcaagaatggtggcagatctgaggtttgtgcacatatacctgacataaatgtgtaccaaagaagggagcataacaaggactaacttttatagacctctctcattaaaactcaccttcagaaaccacttctgttcctttctcataatcaaatgatgccttgtaaccacctaaccatttttaatattccccagactccactgaactacgctccagctcagacactgtctagctagtcaggaaagacagtctaccgtcgtatttaaaagctgttattgggatgggttttacaggcaccaggctaggacaattcagaaacaattgcttatgtgatagttggaggatttgtccctgtcaaacagttaatattgctttaatacatgaagtaggctgtataagacagcaataatgaaaaatgtcaggaaagacaatatcaattgttattcaacatccacatcaaagattacttttttgtcagtagctttcagaaaatgtattttccatcagatctgattgcgttcccctttgaagtgctccaccctcccggtagatttaatgtgacatctaggcactttttagtccctgggcctctgaggcgattcagagaggcacaacaagccatcacaggtttatcctcaaaggccgacactgtctgtctgatttattgtaactttaagaatcatctccagcaaagcatgagccctgctacccagccacagcgtcagacttttatcaattcatttgtatgcagccagtgcctcttggaaccgagagccctatagccactcatggaaaatgcattacctgcgactaatcctttttatctttaaagtctgtattttttatgtataagtcattttgggttatcataaaatatacataattctccctccccaacaagaaaaaaaaggcaaaatggaaagagaatatataataagttatgagcctgtggtgtccttatcagcaaggattctaaataaacagctctctttatgtaaacacccaggatataaagccaggattactttcaatgggaaataggaatgcttccattttttttttccttttaggtttcaaagtgaaacagggagattaatcattgaaaacacgcttcttgtgcaggcttccttttctagtgtgttcactgctgaggggtggtggagctgctggtggaggtggggtgggggtggggctggggctgacagtcgttctatttcgtaggtttgacaaactgttcactctccagtgtttcccaaaccattcgtgaaatggccttaattaagagcgctagaagcctgcgtcctggaaggatgcaggtacaccgtcttcgccaaccccgccccagtgccgttctgctgtctgaacttgctgggatattgtgctcctgtgcccagcatcctaagtgctggctgctgtcttgtgccattcagtaactgttccaggcatttcagctctgctcaggtctggatcctcgtaagcatgggaaactctcttctattttagagtgagtataaatgctgacaggtctgtgccattatctaattaaagccactgtctgcagacctagtcctgatgtgcctgctaggggccatttatgtttaccaccccaccatgcgcattggttcatgcatgtgtctgacagctttttggccacaacagtggagtcacatgttccatagagcccaaaaatatttatcattgtaccctttccagaaatgagcctcctccctgccttggaaccatattggaaatttaaattaatggtgtgtattagtccaacctgacatttactccacatacaagtgcaaagggcttttgggaatagccaaaatggtcttaagggtgctaccaatgactgtttaaaaaattctgagtgggaattgactgtggatagagatgaacaattgctttttttatattcttttggcttttatgacataatatggtaacatttttaagaatctgcctggtgttcagggatgctgtttctcttcctagctggacttaacttatacctttctgtgaaaataggaagatagttcttaggatggtatacaatcctaggagcttaagaaaatgacataatgttattattttttaatatcctcaatgttcagataatatctatattatttacagccttcagccaaaggtagagtttcttaagcaaagtaggactcccagactgccatctttaaagactagagaggtaggttgttgaggcatattattttaagatgtgttacatttgtttatgctgtggaacatttatttaatgatgcaaagatgtgttgcattctttgatgttgcatttgtttaactctatggagctgtgttattttgcctgcctacaacatctgattattctaataaagagctgaatggccaaaggcagaagaaaggataggtggggctggcatgcagagagaataaatagggggagaaatcttggaagagaagggatcaaggagcaagagaaggaggagaggaggattctaggggccagccatctagctacccagccactcagttaacctgccaccctgccaccctgccacccagccagctatggagtaagagtgaaagtaagatacccagaagtaagaaaaggaaaaagcccagaggcaaaaggtagatgggataatttaaattaagaaaactggctagaatatatgttggcagcttaccagtgcaatagtgttgggaggtgatggctccaccttcattagtagatttctaccagtcagaaaagagcttgtgggctggggctgtagcttgcttagcattcatttgattccaggctcactaaaagaggaaaaggggcttaaggatgtgggtttgatctcttattcctctttgtttttccactatgttgttgtttagtggggaggcccctcctaggaggcccctggaccttacacttccagactgtggaactgagacaaatgaacttgtgtggtttagaagctacccagtctacgatattctgttagagaagcaggaaattggactgagacgaagggcagatgatctataggatcactgctctctcccttccaggactatcaaggcttcaccatttcttccctaatagaatgagacagcagagaagcatgacccttagcagaagaggggtttttaactagagaagttgcagtcattacatgttcccccattatttttacatgcagctcatcttctgggaaattatctcagagatcttgccagaacttgcttagagataataggctgagtgtcagtcttctgtattccacagaagaagggaaaaaacatttcaaaaaatagtgccagaagatcttaaagggttttgaaggctttctgaagcagcgccacacatcacttcaccaacagagcacatacaggctgctgcagacacagtagcattccacaataccatggtgcactggaagcccaggctccttgatgccacctctctgctttacctggtgtctcagtacactgtctcatattccctaagtttagaatgtctgtgccaggcctttcttcatggtgacttttctatctggactgtaattgactaatttgattgtgtctcctgatgatcctctgttggacttttgtactctagtagttattatgttgatggtttgtggggtggagccttaggcaggctactcagtttagatgaggtcacggggtgaggtacccacagtaggattaatggcttcatgagagcaacctgagcatgctgcctcttgcaatctgatgccctcacagtgacagaggaagaaggccctcaacaggtgcaagcatcatcctcctagatttcctagtctctctctctccctctctccccccacccctcttgttttttttgagacagggtttctctgtgtagctttggagcctgtcctggaattcgctttatagaccaggctgacctcgaactcagagattcacctgtctcccaagtgctgggattaaaagcgtgagccacaaacacccagccaatttcctagtctctagaactgtaaaacaaataagattctactgcaacaaagtttatgctattctgttaaggcagcagtgaacagacttagacaaccagccctccagctcttgttcgcaaaggtcttgtccatctggaaacaggagcacatcttttatgctcactgtgatcattgtttttgtgaaaatttccatggtttctccttattcttgcctatgacttcactgcagttgcctacagctcttcagatactcattgtatttcttaaatcacatgactattttatttacatgagctcctgcaaggtgggaactatggctgaactgacctctctagttcttacactttggatggtgatttacaagagcagacagtgaacaaatgtctgttgaaaacagggaactgagttaggcatgtctgtgagtaccttataatcccagaattggggggtcagagagagagagacatatagatcctaggtgttgtctgcccacccagaatggctgaaaatgtgagattctggctcagagacagatgcttgtcttaagggaataaagggaacaatgatagaggaagacaccagacatcctcctctggccttcaggtccatgtgcacgagttgacacacccacctacacatgtgtacatgtacccccacctcccgccccccacatatacctcacacttaaccacattcatacagcagaacaaaacaaaccaacacaaaatgtaggactgtaatcttaggtcagaaagaaacttgggaaacatctcatccaagcccaaggtatacaggaattctacaggagctgtttaaatgactttagacagggcatcaagtatctgcagactggcctttgagagagaggatcagggacagctcttgaaagttcatttcttgttctaccttctactcacagctaaacagagcacagtgtggactatctgctccgaccctactgtgggaggagtcgcatttttctacatgtgcacagtgaggatcactgctgggactgagctacttggcttctgccccacttctcttcactcagtgccaggtctgggcagatgctcaggcccctaacttttttctacttcaagagagattcaattgcttagagccttgtgttaacatttccattttgtttggaaaagtacataggtatttttttttgtcacgcttttccctctctccctgctgtctaaggttggctttgaactctgtatctttttaccttagttttgagaattctgggattatgggtgcgctccaccaaacccgattcagatgtggaagaggatcagactgaggccagagacatggacaaaggaaaagatagagggagttaaatctataaatgacagtgacatggccgcagttgctgtcacttgtcttgaggttaatagagagatatgtctccatctcatctcagtggtattcaaagtttcattctttcttacctttccccgctctctctgccctcagcatagctttgttcctctcatggataaattgacttaggcttaggattttgtacttctctcatgcctggctggctgtgccttttgactatctgcagaggttataccacaccagtgtgggaagtggccctataggtaggggacacaagagaagaacctggtcacaatccggaagagggctggtggtggcctaaggtgagggaaggtgccacagagacttcatcccagtctattggctgatgctgcttcccaagagagttcctgaggatgccctgtgctagtcatggtctaaaccctgtttacagcagtaaaaagcatgaagatagatgacccattttctagttatagctttgtcccaactatctggggggccctggactctctgggtccccagtctttatctgtaggaataaaaagatggactagatgatctctctctctctctctctccctccctctgattcattccttcttcccttgctgtatgtgagtggtgcatgtataccagggtgtgggcatggatgcatatatgctgtgtgtgcatatggaggacatctggtgaaggccagcaagcatcagtgatccttttgtctcttctggcacctggtgctgggcttaaacatcatcagtcatactatttgcctgggtgctgtggatttgaactcagtccacttacttgaatagttatctctgtagccctgtgggctgggtgatttctgaagtgtttctaggtctagggagcttagaactctttgaattttgttaacattctaaaggcatcaagtgttcttaagtagtagaatatttggcagtatttagaataggcatatttaacttctgtgcctgggcaccattatttatccaaaaaaaaagaaaagaaaagaaaaaggaaaaaagaaaaaagaagtaaactctgagccagtttctgaagagcagattttatttccctgcgacagcccttaaatgctacacttgttacatctgagtgctaattactggagattaattagtcagcatgactgtacttctggggtgacccccctgccactactgaactgtacttgatctgtgctacctgcaggttctctgcagagataactgggagaggggcggggacctttctgaggccataggtgagccttttgacaattctccagtcctgctttaagaagaacagctatcaagggcagtcactccgaaaataattaaatggaaaatatacttaactcaagaatgaagattgtctggctatcactccatggggccaacctacttttggtgactaaaggttggtaatggaagtgatacttcttggtctctgtctggctctgtgagagtcctgaggtgtaaacctgggtggtacgatcctctccacttctctctgcttctatcttggccctcagaagacatcttcagttagggatgttgtgagatttaatcaattattgtctaaggatgggaagatcctgggatgaaaggcgtgaagataaaagcgaagtccatcagtattatcctcactttcctatgcccctcttctattagtgacatggggtgacagctgaagtgtgctttggtgcatgttacaaaatataaaaaaagcaaggaaatggcagtaatctcaaagccaagcccttgttcttctttgtaacctatgcacagtagattggcttgtgttcttgcctcatttatctctttctatagggttgtcctgtgtgtccaattttcccttattaatgaatctccccttttgtcctgcacagtctaggaggatgacatttatacaaggcaatcgttttcatgcattaccacaaggattatttattggtggttatccagcagaagtaagcatatctatcattggcattggacctagattggctgctatttccttagcaaaattatttgctgattagctttttctggtctttagatttatgggttaaggggaaaagacccggaaaaatccccaaactttgggaaaaagagccccctccctctgccatggcaggatgctaagatgctctgacttatttgtcctctgagaagaaagtccaactaagaccttgcttccagacatagatgcttaaaaaaaagtctcctgtatggtcagacatggagtgggctggggagctcctgtggtactctgaaatgacctgaattgatgctgagactagattggcttctctgtgtgatcctaggactatgcacattctcaaatggtcttgaatctcagtacaggaataaatgtgcaagaagtatatttcccattttttccctgaagttcaacttaattcacattaccctggcatgaaatattgtttcaattccaagcatctccctcctttacctagaactgtgattaagttgcaagacttgttagatactgtgggtccagtcgtagtgtgtactgcccacctacacaggctgctcttttagagcatgtggtccactcccaactcaatgatgcattggtatctcagcaaggttgccacaacatgactcaatctaccatgatgtggaaaatatgaaccagagcttctcttgggacctgaatctttatctctttctttcctcaaagcttgagaaaggattctattttcaaattcattttctttcttttagatctttcccaaatcttctctgttctgtcctagggctttcttatttaggtggtgtgtcaggagacattggcaaatactttttagatatttgtcacctctgctaaagaaataaccattgattggacttgctagaggtaggaatgaatggagagaagagttgataatagaaggtgggaaatacagttaccatttgacatcaccattcttctagttttgaacaaagactttgagtagcagaagatgaggcctgtctcagacccataggtagcagggacggcacagtgagatttggaagggaggatagaagctatggacttggaaggttagtcacagttatatgcaaggagctttagaaggttattataagggataataaaagttgtgattctaaaatgtcactgatggcacagtgtgtcatctctatagaaaaatttaatgttaaaagatacagttaacacctgcaataaaagacgtatttgtagggctgggcatgtagcttagtggtagagtgcttgccaaatacatacaaggctctggctcaatcctcagtgtagaaagaaaagagtgattgccatacaataccatgagtcctgcaaaactgattgaactttagaacactatgcagacactctcaaatactttaccgaattgtgtattaagagtcaaaacaaaatgcaaaccacaacttacttggaaccccaggactcaaacttgttgagaaagctttttagagaatgaagttaaatagctacttactaatcatatataattatctagataatgaggcaaatggaaagatgttaagaagtgccgggcgttggtggcgcacgcctttaatcccagcactcaggaggcagaggcagaggatctctgagtttgaggccagcctggtctacaagagctagttctaggacagcctccaaagccacagagaaaccctgtctcaaaaaaaaaaaaaagatgttaagaagatgtgttatcagcaacacaatgacagcaggaaataaggtatagaattggcagggcatttccaggccttggaaacattggaagtgacatgccacaagctgtaaagtagtatcagctatctgaggctctggagaggaaaggttgctagagttaaaagagacagataagggagtggatcatggtggctggagaggttgttgagtaaaggtgatgaagtggatttagacatgaaaattatttacgagcttatccatcaagcaggtggaactgttaggggatagagatagggctaaggctgcatcagaactaatagttgaagtcataaaaaagggtgagcttggggatcatggaagggaaagaaaagaaaggaggcagactcaggccaggtgtgacctgtatacagtgttgagatatctggaaccttatgttaacttgattgtgagaatgtcaatagacaggctgagatgggactataatccagatgccacacagtggagtatgtcaggagagtggccagtaaggaagaggcaaatcatgaaagagaagggatatggcaggtgacatgatctgtgatgcaggaggcatggttgagtcaagtcagatgatagtggacagccagaagatgctgcagctcatgaaagaggatggaggaaggaaggtctgatggaccaagaatctttgttcacaggggaactgattgacaatgatatcaaacttcagccaatcatgctgttgactctgaatgttggttccagggtgttaagttctgccaacatttcagtggctggctcgctggaagggcacatgatggcaagttcataatatgcatttatcccaagacccttttgtaagctcagttaggttactcaacactaagaacatgatgggttttctgccaaaatctactattcacattttcaaggtatctcattcttcagttttacagctaaccacccattttaattacaaatcatgccaaggcaaattaaaaatataaaacttaacgtactagtttttcaacaatagctaaacatattaaaacaatatatattcactcagggtagagattatatttattcatctttatattcccaatacctctcatgatgcttaacaaacaacacatactctataaacatgtgaagggtgtattgtgtagggtaaggtataattttaatttaaaatgaatttagatgtctgacaactgttaaataaaaaagattaagagtacttactgcttttgaagaggacctgggtttggttcctagcaccaaggttatgtggcttataacctggtataatttcaattccaggggatcagacatcctcttgcatccactggcattgcacacacatggtatatataatacatgtaaactcatgaaggaatgcagatacatatacattaaaaatcttaaaaaaaagtactttcggaaaggctattctgttgatattgcctgtgaatgatgacttggacaaggccagctctttattatagattattttttcatgctataaagaatattcaccaaatcatgttcaactgaaacacccttaaagcaacttactatatttattttcgttttactttatagttaagaaaattggatattacttttgcaagttatagagcctgcactttaactgtactgttggtgctatttcacattaattttgccctggcattggggaagacaaattggggaaggattgttttgcaggtaaggtgctataggatctttaaacatttttatggatgcttggataaaatgttttaattcttaacacattctttctgtttaaaattagctcagaggcaaagcaaggattgggacactgtttcaaatctgtctttgatgttcaataggatgagcctgggcctcaggataaaactctgttgattctgcaagcattactgtgctaatgcacactgaacatctgttgttattggcttatgcctttgtctgatccaccagtatccataccatacttgtttatgacactccttgttatattctgtgctagcctattgttttggttgtgaacttagcctttaacagctgagccatctctccagccctgagttagcctattgttgctgtgaccaaatacccaaccaaaactactctaggagagatttatattggctcatggtttcagaggtttcattccgtcatggaaaggagagtatttccagaaaggattaactaagcatgtgtgtgtatgacactgtctcatagtctgtgtctcagagggtataaagggaataaggactgtttaagtgaggtttagcaagctcatatgttaaagctagtcctgatggtaatatgatgggtggttctggaaactacaggaagtggagcctatcttgaggaaattggctgctagagttgagtctatggtagtagctcatgcctgaccccttcctgtctttttatttacttcctgtttgccaccagttggacagttttcttctaccacatgctcctgttggttgatattctgttcaaggccagagggacaattaataatgagttgagctctctgaaaccataaacaaattaaatatcccctcattcaagatgtttgtgccagggattttcatcacagtgatgcaaaattagctaatgcaaggacaaagcaaactagcacagatattctctctctccgtctctgctatgagatgaacatctctgtcccatcaagcccttctgcctttggtatctgcctcatttcaagtccataaaaatagagctaagtggccattttctgaaacctccagaattatgagccaaaatgaatccttcttcgcttcccttgagtctttctcatctcttttgtcacagggatgagcaatggattaacatggaaaattggtaccagagaagtagggcagttgccatgtgcttcacaagcccttggaagtaattggtgggagaagtaggttagcgaatccctaaatgttataagcagagtttaacaggtgattcttgtgggagcctaggctgataagagtgtggaggcttgttaggcctcagatgggaagaactctattgagaactgaaatggagagacttttatattcatctctgtatgttaatccgataacttgtctgagactgtgcatgaagctgtgtttagaggtgatagaataatttaatttggcagaagaaatgtaaaggcagcccaggatcttggctgtagccaggttcctgatagctgcttttgaccagatttaaagtgcttaagaaaagacaaaatgctgggaaagcttgcaatttgtccagaaaacaagtctgtgtgaagttgaggccaaggaaagtgtctggtaaagagactaatatttttatttttatttttaataagttttttgatacagggattctctgtgtaacagtccaggctgtcctggaactcattctgtagaccagcctggtcttgaactcacagagataagcctgtttctgcctcccaagtgctgggattaaatgcatgaaacactgttggaatatttgtttccactgtaaagatgtctctgtctgaggtggcttctgattggtttaataaagagctaaatggccaatacataggtaggagagaataggctggacttccagccagaaagagagagagaaactggaaggaggaacctaggtgtgagtttcaccaccagactcagagcaagtctgatgtgctgtactcagaagaggtaactgagcagtgtgaccaaacatagatttaaaaaaaaaaatgggttacataagttgtaagagataattgggaaaaagcctaagtttaggccaagctttcataattgtaagtctctggggcattatttgcagtctggtggtccaaagatagcctgacaagaaagcttgttacatgataccattgcctaacaagactagttttaaaaagaaaaaaaaaaaaaagactcaactactttgcatcaggacagtaaaaatgattccttgataatatctcagaaatttgagggcctgtccatcacaggctcaaatggtttaactcatttttattatttttatttattatatttattattttattatttattaactcattaaaaatttgagagctttggggtaccctgtccacataaggtcactactgaaggaagtaatcccttgtgtttggccatctagttattcgggagcagataactaaccatttaactaggaaaatgcccctattttcaatcagtctaccagtggggaactatgagtttattaagtagcttgggttttagttgatctgctggtaaagtagagataatttttattattagaaagattggattaattattagagtaattactattttcattggcaaatagtaggtgcttatgggattgctagtcctcatctatgtaccctctgtttttttttgcattattaagaatccacgttctttcttatcctaagaatcatagaaccctaagatctcagaggctgaagggaattaagggacactgtatatgatatagttctaggctcaaaggcataccttgttggtatatgtactgatatggctagactgagtagccagcaagccccagccatcttcatatctttgcctcctcagtgcgatagctaagtactaccttgcccagtttttaaagtatctatttttatttcatgtgcatgagtattttgtgtgtgtgtgtgtgtgtgtgtgtgtgtgtgtgtgtgtgtgtgtatgtatgtatgtatgtatgtatgtatgtatgtatgtatgtatgtgcaccacatgtgtgcctggtgtcactggaggtcaaaagagtgtgttggatcctcttagagttgcagacgtttttgagctgccaggggaatgctcagaatggaacctggaccctcttcaagagcagcaagggctcttaactcccaaggcccctctccatctccattcaacttaaaacatgaatttgctaagttcattcaaaatctatgctgtagtctgatgtttttatacacaactctcttctgctgtaactcaccctatacctctcccacaaacccactccctcacatcctttacaagagtcagttttgttctttaaaaatgcctgtagggactagcctacatctgccgtatctctgcccattgtataataattgaatttttgaatatctttattatttcctttagcaaaagagacccataaattttctgagcaaaagaactatatggcctatttgttataattcccacactacacagcatgagggtatgcaataactgttggctggagtaattttgcctacatattgggtaaccagtaaataaccataaagttagcaagccacttctgtgttagtccagttttacattactataatgtattttgagatcaggtactttataaaggaaagttggttcatttagctttggtgtttggaatctgaaaattcaaattgcatggttcttctctgtcataccctgtgttcccctgccatatcacacgacaccctggccagagcgtgtgagataggcagaacctaatcttgctcgcttaaaccagccgtctggagaactaactagaggcccaccagaaccacactaatctcttttgaggtcagtgctccctatgacctagttactttgcattcggtcccatctttgaacatcactgtacttggaaccaaactcctaatacatgagccttttgggggaccaaaccatagcaacctctgttatgtaccacatatgtttagctgctttattagggattggcccatttgtttgtcttgtttccttgtgtctagatcctccgggtttgttttccatgctgcttctcttgtctccatcttggctttcaggagaaggactgtcctcactgaggctagtagtagcagtggcagtgttagagaagtgttctttatctggattcagtagtgtgtctgtaaatgtggacttagagggaagccaaactttcaagaaaggaagtggcaggattgtgctttatactgcttgggctgtcacctgggatgctgagctgtgaatggaaaactcttgtagattaaaggaggggacagcagacagccgggtgtgctgcttatccactgtccttcaaaatgtctgtgaagcagttgaccttagagggactcaatgatgtgcctgagtctcttcaacttgctgttcctatttgcacttgactttgtggcttccttttgggaaaggcgttttttaaaggactaaaaaaaaagctttgtaccccagagatacccgaaggtggcatcttaggcagacagctttccaccctctgtttgttagtttccttccaggaggaaatctcttcttcttctgaacagctgggctctgtgatctgagacacgctcaggtttggcagcttgaacttttaaaaataataattatgcggggaatggtctctctggtctgtagggagactggaaaatatggagttacttctggagctttttaaaagctacgctttctcaaagtgctgttttttaaactatcataagtcaaatttatcatggggataatgtaataaagacaaatattcaaccaataatgaaaagctaagtaaacgggcctgtttaggctctattatatgcaggggagtacattaaaggcagctctaagagacactttaatggatttaacattagcaatcagacctggacttggtataaatcaaacaccagcacatttcaccgtcctgcacacccactcattcattagtaccatcaatgcagattataaatattagccaagaagccttcacttcttgagattctttccacagacacagcaataattgaacaataatgatgacaattttatttttatgaatcactatggcttccttttattgatttgctcttgggcctagagaacgcttcctcagccagtatacaacaggaaatggttatagcattatcagatgggctgtaaagagataaataaagtaaagggggcaggaatcaggctggggttcagcaaactgctgatagaagcaagaattactctttccactcccaacaatagggcaccttaaatggttctttcccccgattcttgctgctttctcctcagtgagagaaaaatatgcctaggctgtaaaagtgcattagcttgagagctgagcattttggggttcttggtagcagctaaggaaaaggagtaagatgggaataaatgtgcctgctttagttaggcatcacgcaggaaggaggatggaattccacaggagcatggccttttgcggctgcctctgctgatgggcaccttcgtaggaacaaggcaacacagccttggaaacatatttcacccaagtttctgaaaaggagtggaccctcactgcctaccccttgtccagagcacaagatatttgcctttcctgctgtctctccctgtcctttgtctcccagtgtgaactaactgagtatctagagcattaataagaaggtaacagatgtggactgcacatgagctctctcctgcctcagtaggggattccagggtggttttcatacccttgccatcttatcactgggaaaaagctaagcttctacatctatttgctcacaggcttttgacctcatcatgcctattagggaaaggaatcaagatcaaatgcatcttgggccagcaaacgctctgcagattctaaacagtgacagagatgaacgtgtcccattgtagagtgcagggaaggcatgcctctccttggagtgggcttttcttgtgtcggttgtacagtggaagtgtaagtaagtgatgtctaaaggtctgtccagcatatacatttgctgactctgccctttgtgtccatgggataatgggatactgagctgcctccacaggcagtggggcgggcagctaggggacctgcagtgatacctgctgcatcccttaatccacttcaccatgccacccctgattccatatgtaaggaaggcaaacctgctgggcacttgtcttagttaccgttctatggctgtgaagagacaaccatgaccaaggcaacttataaaagagagcctttaactgggggcttgcttacagtttcagaaggtgagtccatgagcatcattgcagggagcatgggggggggtgggcaggcaggaatgaatggtgctggaacagtagctgaaagcttacatcttatcctcaagttgggggttgggcagaggcactagggatagtatgggctttggaaacaaggccacatctcttagtctttcccatacagtccaactgggaaccaagaagtcaagcatatgaacccatgggggcggggagttctcattcaaaccactataatgaacaacttcagaaaagtaagttctctctctctctctctctctctctctctctctctctctctgtgtgtgtgtgtgtgtgtgtgtgtgtgtgttaaaaaaattgggtcttatgtagcccaggctgaacttgatcccttatgaagctgatggggaccacacagttcttctatttctcttgcttctatcccaccaagtgctgagattgattacaggcttgtgtttccatgcccacaataagttcttttgactcagttaactaaactatggctaaatttaatacttagtacatccatagatttgaaacaatgttttagagagtttcaagttattagtcatatactgtgttttgacgatggggaaaaactcagatacagttggaaatatctggactagagagatggacctgggattagttcccagcatgcagtttgagtgactcacaattgcctgtgatacacaaaactcatccaagcacacacatgcatgtaaataaaaaataaaactaaaacagaaaaatgttctacaagttcagtggcaggatgtatggttaattgagaggaggaaggtgaatgctttgggttaggtgagggatcttatatctttgaaagtaaaaaaaaaatcattctatatgccaaaaatatctcagcaaccacagtgtgggtcaggtgtaaccacaatgttgtaatggtttgcaaagctccttggagacaggtgagttcaaggtcctcattcgtttctaaaagtgtgaaagttgtaattgtacatagggccagtctaaggagagtgaccaacactgtttttggggggtttccaatgggaagaataaaagttcctgtactaggacatgctgtcccccttcccagtagtgtttataaagtacaaaggagagccggtactattctgacatgaatgagataattcattaggtaccctgaatgcctaccaggagtcaggtgctttgctagaccctgaataaattacagcaaggcaggctgcccacaggccccggtaggctcacacattctgaaagagtcagctacggtacttgattacagagcttcagatggtggtaaagggtgactgatgctatgatagtgtggtttgaggaaggatgaaggcccaataatcaagaaacaaatatggatttcctgagtaagaagactgacgcattcaaactcggttttcagagatcatagtggctgctgtgtaggagatctgccagcatgtgataaaacttagggactgttggatactggcaagtggggcactgtctttgtttcagaatggcaggtggatcttcagtcacttagaagtttaaggaaaaaaaactgatttagcatatagacagtgtttttcatttttaaatgattgttaagggatgtctttgggaggaactggtcgttctagacaatgggtgaccaggtccagaaatacaagttctccgtttaaagttctatacagtgcttgcagtgatgtaacactagtcttccagggggtcagaagtctgtggacttcagcctttgcctcagactctgtcagtgtggaggggcaactatgctcatgtgatagtaactaattgaagggcctggtgaagagcctcatgcatggtgggtatttggtacacatctggatgggtaaagtcaggactgttaaccaaggacacaggcttcctgaagacaacaaaagataaggactaggcccagaaggtttgtaagtagctgtgaacttttcaaatgagatcggtcctggcctgatagttacagcccctttgattcatggaaatgtatgtgtctgtgggtggcttagtaaagagatacctggggcatagctaaacttgggaagcctccagcagtaatgtctgtctaaagcagtgactctcaaccttcttaatgcttcgaccctttaatgcagtttctgatgttgtggtgaccccaaccataacattatctagttgctgtttcagaactgcaattttgctatggttgtgaatcataaatatctataacccaaagggggtcatgactttccagttgagaacccccagcctaaagggacctgggagtctttactctcacagcaggcttgcagtacttggcggtgatgggatcttgacctcttagtcatgttcttctgcaccataccagaacactactggggaatcaggattggagaaagtgaaatgggaggtcatgagtgcctggacctctgagttatgggactatagcatatggggtgttctagctggaaaagagaatggtcagtagtaaatccagggaatctttctcttcttcaggtcaaacttagtggtgaaacctatttctcctccatgtgacaggggctgtgatttttataacttaatgttccaggttcctttggttgaatgaatgcattgcccatgttactgtaaggtggagagtgattggtttcagacatttgtagagacttgtaaagtttgtcatgcaatctctagtcatcacacactgaatagaccatgtatctctggggtcagatggactcatggagcagaaggagtgctatgcttgctcattcagttctgggagttctaggaaagggtcactgtccctgaaggtcagggagagatctgaggactctaagagggagtcagctgagtgtgaagggccacagaaaacctgggaacaggaagatgaaggaatcagaagccttcaaggaagggcatggaagttaaggtgaactggctagatgtgggcaggactggatgaagtctaggaagtgcaagggatcccaggggcctgattctgagagagctcattgttacacactgaggccttgtggcaccagcagggcaacaaggaaaaactggaagagttgtggtgggcagggaatccagtaggcattagggtgtgtgctccagggtgagcctggaggccagacccttgacagcaggagttcatcagaggtgttgctctgagtgaccattgaacggagaaaaatctcaccaagtaagtctctaagacgcccataagtacattcctttgtctcttctatctcccccttgtgtctttagaaaagtatttttagcatactgtaagtggtaggtagcagtggacagtaagagagaattgcttcagttaggatcttgtttgtctttttgttctctcatgcaagaacatttattatgctatctatcctcttaaaatctgaagtgtacatgacagggggggtcaatcttcctcacagtgctataccgcagatctctaggacttaccttatacaacccaggctttacccatatggagtagcaactttccattccctttccaatcccagtccttcacaactgctaatctaccctttaagagttgaaatatcaagccaggcgttggtggtacacgcctttaatcccagcactcgggaggcagagggaggcgaatctctgagttcgaggccagcctggtctccagagcgagtgccaggataggctccaaagctacacagagaaaccctgtctcgaaaaaaaaaaaaaaaaaaaaaaaaaaaaaaaagagttgaaatatcatagaatcttcttatgtgtgttaagaatacaactgtctcaagaggaaagcctgttcaacatgagtaggatacccagcagccatcctcatggattccctaggatcttgatgtaatagaaaatgcctgtctcccgaccgctcgcagtttatccacagccttggcatagtagtactgttcttaaaattagttatttattcctttgtttatttatttgtgtgtatgaataagtgtgtgtgtgtgtgtgtgtgtgtgtgtgtgtgtgagagagagagagagagagagagagagagagagagagagagagagagaatatgtgaacgtgtgtctgtgctggagagtgcatgcacatccagagaatgaatgtggagatcctagggagttggttctctgcttccagggatcgaactcaggtcatcaggcttggcagcaaacacctttatccattgagccatcttgctggcttttgtcgcttttgtttgttttaatattcctggagtgaatggaaaactggcttcaaagcgtaagcagtactatacagaaagacttcacatagtagaaggagggaacaggcgctccacaatcagtgggtttaatgctgtcagtaacactggggacagggtcttctcagtattagtgtaccttcttcatggtttttagatggttgcagcaggttcatgtatcttatccagatttccctactgatatctctttttaggagatggcaaatttttctagcttctttgtctcgccaaatattcacctactgccacaataatgaaacggcaaattatcacagacttggtgcctctcaggctcatagttgattgcatctggccaccaaagactcaaggcgttcccctcagtcaacagtctgctggcaccggcttcaggctgcaagttgggttctaattgctcctatgtattcattctgaggcagagttgaagtagcaaccactgagagcatctcttctaatggtgcatcaatagaaagcaagagccaggctttccatgtagtgcttttaagccccgcggttccccatctgttaatattccatcagccaaaggaagttgcatagccaagctcaacacagaagggtaccgaggaaaaagaagggcggtagcaactacccaataatctgtcaattataccccttgttccccaagctggctttgtctcaggggacctcagctagaattagctcagacacaaaattctaaactgatcatcaaaaaatgggggaaatatgttgctaaccatgacttaatcaacaggatggtggggagtcaagcagtttggcttatagagaacctagtagtcacccagtaggcatgaacagtagaccaataaagttccttacttatcatggagactccaaagaaacaggtacacaaagacgctccctgtcacctgcttctcattacctgtcacatggaaggaccagaagatctcaggcatgatctccacatgatctatttgattcctattctagcctcccctgatctggtccctgtctctggtctctaactcaacttctgaatctcctgtggctgttccttctcttggcccccgttcctctctcacttccaccttcccttggggttcattgtgtgcacttgactatgtaaccaaagcaatgactccaggagggaaaagtttccagagagagtttccataatactgtggtcaacactacctaatgtttcccagtacttgtactatgccaagaaggctgaccatgtttagtgtgtgtgtcttaaatctgagtttcctgtaaaaccctcctaggaccttagtgatgtgcctgcttttcctcttttcttcacacatgaggcccttgaggccaaaggagctcaaataaagtgaccaagattataaaactggtaaagggtagagttgggattaaaaagcatgaacctggctccatattcatcctcttgagcactaggcacttttgtctgtgaaggatttgtaatttaaaagcatattggaatcatttggggatagggtaactaatacatttttgagtattgaaaacaaatcccaaagtttcctgatgccattcccctctcccacagcatggatccaacaggatcctttctgtgaagataacagcggaaaagtattatttttatggaattgttaattgttttatggagcaagctcataaaagtcacagaccacaaaacataattacaaaatgcacttgacatcaattacaggaaatgttgatttcattaactcgcatcttgtccagagctgtaaattatgggaaggaatgaatgtgtgttcttcacgtttcagtggctaatcatatctgtgcacattgatccatcatggaggcagagttgagggtggatcctcacagcactctcttgaggagtagggaacagtgatttcccctttcctccataggccatatgcatcctgtttttgaggtgcaggagctgtgccctcgaacttttgtgattcttttttttttccatcttttaaaatttgaattagaaacaaaattgttttacatgtcactcccagttcccactccctcccttcctccccaatcccctcccaactaaaaccctacctatcacatatccttactgctccccagggagggtgagacattccatagggagtcataagagtctatcatatcctttgggatagggcctaggcccacccccgtgtgtcttggctcagggagtattcctttatgtggattgggcctcaaagtccacacctatgctagggataagtactgaactactacagtcctgtagattcccgaggtctcctcattgaaacccacattgctggggtctggatcagtcccatgctggtatcccagctatcagtctggggaccaagagctccccgttgttcagctcagctgtttctgtgggttccaccagcctggtctggacccctttgctcatcagtcgttctctgcaactggattccagttcagttcagtgattaggtgtgggtgtctgcttctacttcaacaagctgctgtgtgaaggctaaaggatggcatataaaacagtcatcaatctcattatcaggggagggcatttaaggtagcctctcctctgttacttagattgttagctggtgtcatttttgtagatcttcagacctttccctagtgcctgatttctctgtaaacctaaaatgtctccctctattatagtatctcttttcttgttttcttctattcttcccctgactcaacctttctgctccctcatgtcctctgcatcccctcccttctccccttctcattctcctagctccctccccccacatcccttgctcccaatttgttcaggagatcttgtccctttccccttctccaggggaccatatatgtctctcttagggtcctccttgtttactagcttctctggcagtgtggattgtaggctggtaatcttttgctctatgtctaaaatccacatatgagtgagtacataccacatttgtctttttgtgcttggcttaccttgctcagaatggtttcttctaattccatccattttcctgcaaattagattctattttttttttctgctgagtagtattccattgtgtaaatgtaccacattttctctatccattcttcagttgaggggcatctaggctgcttccaggttctgtctattacaaatagtgctgttatgaacatcgttgtactgatgtccttgtatgaatgtgcttcttttgggtatatgcctaagagtgggattgctggatcttgcggtagactgactcccattttcctgaggagtcaccatactgatttccaaagtggctgtacaagttggcactcccaccagcagtggaggtgtgttcccctttctccacatcctctccagcataagctatcattggtttgttttgattttatccattctaacaggaataagatggtatctcagagttttgatttgcattttctggatgttgaacactttcttttgtgcctttcagccattttatctttctctgttgagaattgtctatttagttctgtaccccactttttaattggattgtttggtgttttggagacttgcatcttgagttctttgtatatgttggatatcagccctctgtcagatgtgggggttgatgaatatcttttcccagtctgtgggttgctgattcttaaggtgtctttagggatccattcatttctcagttctggagatcgcaacagtgtgacgtttggactcccatcatcacaagcgtggtacagttttctggagactgtaggatgtcgagtcctgacatatttgtagaatgagacatgggaatccagattatagcaaaatttaaaaaagcagaaagcaatggtgacttttttggggggaggtatagttattcctgtaaattattgtgtgtgtgtgtgtgtgtgtgtgtgtgtgtgtgtgtgtgtgtgtgtgcattaacatgcaataggttcatttttatgttaaggtaaattgaaaacactcaatatctcacttttaactgctaataaaataaatattggtaaatataacccttttcataaaagctcttagagactcccaataaactttaaaagtatgactagatctcaggacctggagtttgagagccattgctataacctaccatgaacttactacctctttgttttggaagccaggagtgccatgcccaacttacagcccacctttcagcatttccctgagcttgtaagacattaatattttcccatgtgttacttttaactccattttcttcctaataattgtatgatctgtttatttctcatacatttctctttattttaaaatactaaatcataagctttttccaagctgctatgggctgttggaaattaaacattggtagaaaagggtgcgttggccttttagagcacatataggatgcaattttgaagattttcatataaatgtgctctcaaattcaaatgctgcctctcacagactgcaggcaggctctgcctctcattgttgaagccattgccactgtatctaaatggatgggacttttgtcctgggctctcttcaatctccagtctctaaattatgcatatccttttaaggtgcggcctctctcccactctctccttccccagcctgctggaattccccccctttcttctactttgcatttacatcctctatgacctattcttaaaatatattttcaaatgcatttcttgagttcagaataaaaggctagtactttcagcattacttcgtcttcgttattagcctcttataactctctctgatttaaggttattgtataatacttgagctctctgctaatgtacatttcattggccctgtaatcagtgcacatttcaagggcttcagtcaacaatagtacctgaagctttgaatttgaaaaaagtataattatttttgcaaattggtgtctaaatagagaaggggattagattggtctaagcattcagtaaagcatacccttcaacttcggcattgtatattatgtgcagataattaaacttttagtgagcatcagttgtcaattattatcatagtttggatgagcgaacttgagagtaacccccttttctctctctctctttctctctctctctctgtctgtctctctgttgaaataaattgttcagcctggagggaaatgtttgtctattgtagtattatctgtgttagagagtgcttttgccaaagcttccacaacctttggaagtggagttgaattcagtggggagggaagagaggaaggagagagggagggtgatggaatgagagcaatctacatgacaccatagttgacttgctgttaaagttcatttaaaaagtatgattctcctgtcctttttttggctttgttttgttttgtttctttcttccttttatttttcccttttttgagacaagaaactcactatgtagacctggcagacctcaaactcaaagagatacgaatgaatgcctctgcctcctgagtgctgggatcaaagttgtgtgtcaccacacccaacttaatcgaatcctaaaatatttaaaaggatgctaatttttactacatctatgagggaaggagggaggggagagagagagagagagagggagagggagagggaagagagaagagggagagggagagggagagggagagggagagagagagagagagagagggagagggaagagagaagagggagagggagagggagagggagagggagagaatcagcttgaggatatctattcaagtataactagtctattttctaagtgactttctttctgttgtgtcacatttcctggggagttgattttcattcatccctgatagaaaggcaatggcagagcaaagtaacaatttcatccaagtccactggttgaaccaatgagtttgctggacatatagaagcatagatgacatagatgcaactgcactatctatgaagatctatgcgctatctctcccttttcctccattattggttagcagtttatgtatccatgtggagaagagggaccctcatgagtctgcttctccttccatgagggaagctaatgggcctgttcatgtgatggtcactctgatttcaaaatggcagcagccatattgtgcctagaggacagaattaattctacaacactttgattaatctaaacctagcttgaggggatataaataataggattgatttaaaaaataatttattttatatcctgactgcagtttctcttccttctccttcaattcctccccccacctctcttctgccctgtaccccaatccattcttcctctgtttctattccaaaagggggaggcctcccgtgtgtatcaacaaagcatggcatatcaagtttccataagattaaagcacctccccttgtgttaaggctaggcaaggcaatccagtatgagaaacatgttcccaagagccagtcaaagcattagggacagcttctgctcccattgttaggagtcccacaaatagactaagctacacaactgtcacatatatagagagagccttggttggtcccatgcaggctccctggttgttggttcagtctctgtgagctcctatgagccaggttaattgattctatgggttgacttgtaatgcccttgaccattctggttcctaaaatccattctccttctcttcagcaggattccctatgcttagcctaatgtttggctgaggttctctgtatctgtttctaccagttactggatgaaggctttctgatgacaaaattggtgtagtcaccaatctgatcacaggagatgtctggtttagtctatatatccactattgctaggagtcttagctgggatcatccttgtggattcatgggaggttcccttgtatcgggtatctacctgactcagaaatgcccaccccctttctagtcatctctttgaatgctttccccatccatccatccctcaccccaatgtaagttcccatcctcacctgttctcagtccaaccagatggtctcttctgtttcctctccccagggaaatccatacatctcactttgtgccctctttgttacctagcctctctgggactatggatcatagcatgattatccttaacttcacagctaatatccacttatgagtgactatatttgtctttttgggtctgggttaccttactcagagtgatttttttctagttctatccattcaccttcaaattttatgatgtcatatttttttttaaacatctgaataatcctccattgtgtaaatgtaccacattttcttcgtcaattctttggttaaggggcatttaggttgttttcaaggttctggctgttatgagtaaagctgctatgaacacagttgagtaagtgtccttttgttaagatagagcatccttggcatatatgctgagagtatagttggatcttgaggtagaatgattcccagttttctgagaaactgtcatattgatttccaaagtggctgtacaagtttgcactcccaccagcaatggatgaatgttctcctttttcaacatcctctccagcatgagctgtcatttgtatttttgaccttagctattctgacaggtgtaagatggaatctaagactcattttgatttgcatttccctgctggctaaagatgttgaacatttctttgtttctctgccatttgagattcttctgttgagaattctttgtttagatgagtactccattttgaaaaatggattatttgctttgttgatatctagtttcttaagttctttatctgttttggagatcagccttctgtcagatgtggggttgatgaagatttttttcccattctgtaggctgctattttgtccttttaacagtgtactttggcttatagaaggttttcagtttcataagatcccatttatttattgttgatcatagctgttgtagaaaagtcttttcgtacagtgtgaaggtgtattgctctcattggtttaatcaagggctaaatggccagtagctaggcaggaaaaggttagtcaggacttgaggacagggagagagctctctgggatgaaggacagagtcatcagcaagacaagaggaagtagtatgtgtacaggatgtataacaagccatgtggcagcaagtaaatgaatagaaatgggttaacttaagttgtaggagctagttactagcaagcccaagccatcagctgatcatttataatcaatagtaagtcttatgtgtggctattgggaattggctggcaggacagaaaattctgccttcaaatggcgcccaatgtccagccacatatacccacataaagcctgagaaagttaaaagtttggaatatgaagtcaaatgtggcttcctggtgactgaggtatcttggataggctcagcctacagagactgccggtggactggggccatcaccatgtgctaatctgagccgtgtctgcggtggacagcagttttaagattcatctcatgcagtcagaaaacactatagatgttataaatgacaatacatacaaatggcaatacacaacattttccctgaagcctaacaggaagggataacactggattcttttgaatctgggtttctttgctatgatgtttctgtgccctctgtgtaggtagattgcttcctgctctcctgttgagcattgctgtttatgttcattctttgcttaccttttcatcaattcacttttgggttttttctgctttgtagcttttatgaattaagaataataagcaagtgtttcaggaaccatgaattttctcaattttaggtaacttcctagatatggaattgctggcttatatctagggcatgtatttaacttaatgagaaactgccaaagcttgattgcacaatttaatattcttaacagcaagtgtgaaagttctacttgctgatattttggctgatatctggtggcatcattctgtttaaaaagctactttagtttaggacattcattttaattttaatctgtattttcttggtaacttgattgcctatttatttgcttattgggttttataactctgtaaatttttattaaagtgttagttttaattatgtgtctgcgtgtaggtatgtgcatataagtaccagtgcctacggaggacagagacattcaattccttgggactggagttacaggctattgttagctgcttgatgtgggtgctaggaagtcaactcaggtcctttggaagaatgctatgtgctcataatcactgagtcatctctccagttcctgtttttcttctgagacaggctagactcaaacttgccccatccttcctagcgtaaagattatagctctgtaccaccacattgggcttgctttttaaatttattgttttaaaaatcaaattattttaaatattaaaaaactgccagttttcaaatattgttaggaatttatccatttctccttgaattcttttggttgtttaataacataaaattcacatggcataaaatcaccagtttaagaggtctgctaatccctgggttggctatgctggaaactgaggctggaggcctcagttcaaggcttgcataggttacagaatgagttcattgtcacttagtgagaccagatctcgaggtagacaaataaaacagaagtctcatggtagagtgcttgcttagcatgtgtaagactcttgagattgtaggagaaaaaaatacacaatttagtgtttagactgcactcaaatgtcagaaggtatcacgtctatgtgggaggagttttcctatcctgagcacctgttcccaaattaccagcagcctcttcccaaacaactgagtgggagaattaatataaagtataaatgcttgggtaatagctcaggcttgctactaactagctcttacacttaaattaacccatatttcttatctatgctttgccacattgctcggtacctttatctcagtatggcatgctcatcttgcttttcttcatttcctcaagactctcctgactccacccttcttcatcccagcatcctcagcttgattgtcctgcctatacttcttgcctgacaatcagccaatcagctttttattaagccaattagggtgacaaatctttacaaagcacaaaaggattattctgtatcacctctatctagttccaaaacattttattgatacccaagaagaccccatgccatgaaacagccactatttcttcatcctcaggttattggcaactagtcctctgttttatgcttccatgaattttacctgttctcactatttagcaagaactgatcatacagtgtatgactgtgtctggcttttctcagtgccgtgttttggcaattcatccatggtgtggcatggcttagtgctgtcttcctcttcatggctccctaccagtattacttctgttattttttctactgttatgtatgtgtacatttaggattttgttcttattgtaaaataccactctttctcttgtaatatcccttattgagtattgtcttactttatgcctatccaacatgcatatgatgggttttacctcacattgttaagtttggatgttgaaactgacattgttgcacatgtatgaaagggctcattccttacataataaggcttccataggagagcaatggctgagcccaagctggccagaaaaatggcttgagaagaagcaacacacacacacacacacacacacacacacggggggggggagagacagagagagagagagagagaggagagagagagagagagagagagagagagagagagagagagagagagagactgacagggggagactgagtgagcgattgaggtttattttttgtgtgtgtctgtatgtgacatgcatctggagtgaatactgctcaataaactgtcatttggtctgaactttcctcttgtgacaactgtgtttttatgacccaaggtcaacctcagatgctcttccccagtatcctgtccaccttgatttttgaaatgttctctcactggtgtggaacttgctgatatctaccctgactgaccagcaagctccagggatctgcctgactttgtctctcagtactggggttacaaggtttttatgcattctggtatctagatttgttcctgatgtttgtgagacaagtagtttagttactaaactctctccccagctccaagaggagtccaggtcttaacagcttgcttataaatgtgggctggaaagagggcgaagaatgtgagtgcttaaaaggtgacaataaaatatttgtcacactctatatattttctatgtaataaaatggtgtcaggttctagattacatgtgtaaattcttagaaatctggtgtcatgaattcactttggttgatagcatttccttcagactcttccagtgaggctgtgcctctgtctgaattacccacctgttctccatgcttaccttgccctttagagttccagaataataactcatagttattttaaaccccattcagacagttactaggtctctgccagctctgtggctggttctgattttgtcttggcctttccagactagttttgcctttcagtaagctttgtaattttttgttgaaaactggacctcgtgtactcggtaatgagaactgagcaagataggctttcagtaggacttttgtttttccaaatgagctgacatctttattgtttgctgctataatgtctgggtctaaaattatccaagtaggcttatttgcatattctctgttttttattatatctacatagacttctaaaaaatgttacttttgcattaaaagtgtgtgtgtgtgtgtgtgtgtgtgtgtgtatgtgtacatgattgcagtgcctttggaggccagaagagagtgtcagattctctggagttggaattacaggtggttatgtgtctctcaacatgggtgcaggaaacaaacttgggtctgtaagggtagcatgcactaataactactgagccattttccagccctctattcagagctcttaataaggtatgaaacttgcaggaatgaacaggccaatctagcctgaactgcttttgggtgcatgtgcaataaggtaaaattgtgtcctcaaaaaatcccccatttctatcttatgcatatacataattgggtatgcatatgactaaaataatatgtattgtgggagcagacaaatgtaatacattaatgattgtattgacctaacctatcaattaaaacagggaatcaccctcactatgctccctggtagccaactccttctcttgtataccatgagaagaagccccaaacaataatcactgcctttgagtgtcctcagtctcatagcctgctgctcttccggtgtgttctgacctcttgcattgctctgctttaagtaacgtttccttggtgcttttgtaagtctgtgtgagatttagtctgtttctttgaatataaggccatgaacctggaaacactcaatcagacttggatcaccagtaaactaggtgagcaagtaacttaggatccttttagttttaattttttggtgagccgggcttagatattctttgtcttgcatattgaagactaacggggttatttccctttctgcagactagttaggacctgatgatgcctcagccacttagaccctgagaaagtggattctccctagggcaagccttgctataggaaactagagttcttggtgttgtttcagaattgttttcccttcccctgacagaggcccagggaatttccttcagagatccatagtgagactagccttggggtaagactccatgtgagttaattctcaagtgtgttagccgtgagcctcccatgattcataggtagagtgctgctggagttaagggcttgtactgagtctctactgtcattctccctaggtatttgtttggcagcaggttcttctgtgaccttggttctcacatctaaggagagctgttggttttatttgttttcctgtcctgaggataggtgcagtgatgtctgatgttggacatgtggtttggtaggcatctctagaagggcagaggggttctgagttcttatgtccaagatcaaggaactggacagagacatagataactactgaggaaactgagggaagcacactcttagacaaagaaacacatccaagcaaaagagagggtgctcattgccccactgtacagagaagtgatggacttaatgtcacatagttcaggccttttgggtcatttgtactgtttgttatgtccgagtactgttaggctctttgtctctgtctctctgtctctctcctctctctcccccctccctgcctcctagaactcatgtagttagcctagaacactatggtagtaaagatgatctgtaatgccggatgttcctccctctactaggtgctgtgatttcaggaatgtttcactatgcccgctttaagatgcttttcttctttttaatccttagtttaaaacagtttataagatttctagatacaattttctgtccatttgttttacttgggattcaacaaactcttgaagaagaaattttcattactatctttattgtatttgggaattttaaaaatagttatttcttcattgtttttgtttttccttttgggacaactcttaactgtttgcacaggcagttgctactacccttcaagccactgaggagcatttattattttttgtcttatttctttctgctcttcataatgaaccctgatttgattaatattgtttgttagcccttcattttggttgaacaagacaattccccagattaatataacttggttttcggaactgaagtgacttgtttctctagaccctgctctcctgcactatccactgggcgttctcaaactcaacactgtctagttactcctagcaatgccaactgaaggccagaaaggcaactttccaattctccttctcatactttccctattactatcccagcctgtaagtggacgtcgagattgctggtttcttgaactagagacttccctccacaggtctttgctggagtaaagcttgcactgttttaagagttgctcgcacccatcaatcttttctcctcccttacctcctgcttttaagttccctactgttctttcaccccattttctgtttctctgctggtattccttatctgtgtagtcattctgacaagtgttcccttgaagtccttgaaaacatttaaaacagctctttcagagttgtgttttctaattccaatcttgaggtcatctcaggataatttttttttctgtatctaatgtgacatttttctgtttctttgaatatttactatttctttgttatacaccagacatttgggatgacacatcccaaatctctttatcttccaatgaagagcattaggtttgtttttcaaggcagttcagttattggctgacctgcttgaactcagggtggcttggtttttattaatgtgtgtctattgggtttgccttcagcattactggagtgtctttaattcagagacacactttagttctgaaattccacttctggaatgccggtgaaaacctaatatatcaaagcccttaaaacaaaaatggtgcggtgtcacatcattgtctcctgccgtaggcgtaccctagatgtttctactcggctttgttgttgctattgttcatttgtttggtatttgtttgaattcttctactgggttcttggaagtctttttttgcaaatacaatatataagccaactaaagatgtgagcagacttttcatgttgactggggacttcttcctacagcttctcctttaaattttcagtctttttctttccctcagtggtaaggatggaacccagggtattgctcaaattgagcacgtactgtatacggagccacagtcccattctagatctcctttcttattgtcccaccactttgaggaccttgattccgttcccaggcactcaagctgttaagagggcagtttcaacagaagagcatggtgcatgctgtagtgaggcagggggattgtgtattccaggtcagcttgaactgttagacattctcaaaacaacaggaacaaaagagtgacagttctgttaccagttgtcaggatccggactgatgtttctaggttcttggcctcttattaaagaatgaaataaaaaccggcacagattgcataaagccaggaaacaaacccagagtaatgaaataggctggaatacactacagggaagtaaagatctcaaaggctctaagtcagtgcttctttatggcatttaaagaaagggggtggccatgaaaatgtaagggggcacagtttggtggatctctattttaagtgattggattatgtaatcttctaaagcatatgctgattcccattgggaatctgattttaatcatgcatgcccaattatgtggtggcatgaggtagtgaatagggaattttccacaaaagtttactttgaggacactgtttcccttactgtaaaggcacccaaactagtttaggccagacttgtctttctggtcttgttcttggactaatgaaattatgattgaataaaatcagtccaggtgtgattgtttttaagggaggagaaacccattccatcttcggaattgagtgtacagtagcctgttgtagacaggacagctgaggttgctaggtgtttttttttttttttttttttcttcaagaaacaattgtgtgtgtgtgtgtgtgtgtgtgtgtgtgtgtgtgtgtgtgtgtgtgcatgaagtacattcaggtaaaggagctaacagggaagctacattattagacgaggggggtgtgtagcctatacgaagaggagtcgcacattactaaactattcccttggcttgtctgtctccgtgctccaggaatcctagctttggagcatctcttagactagggacttttcctaagacaaaagttacaaacatgagcttccctgctttagttctcttttttcactcagttattcactcatgcctccaaatagcttttatcttaaaatttttagttttttttttttaaatttggtttaattcttagctgtgggaagtttatactgctataactactttctcatcagacatgcaacctttttgtgtttgtttcctagtagtagggctggctagtgatgagttttttgccaggagaaaaattggtttggctgtgtgtgctggagaatgcaaggccttaaaggccagacaatggctattttacacgaggaagcatgcaatagggaaagggtcatgtctgacttatagatagcttttgtttttaaatattagaatgatgctgacatttattataattcatggagagacttgacatgtatttaaatgaattggcgtggtatttccatcatttacatgaagcaaatgtcagaacagaagtaagagcctcaatttatccttgtaattatacgtccttcctcccccttctcttactgttttctccctcaccctgcccccttttccccttttctttatccttgactcccagcttttcctccttttttgaaaagctgagtaaaattgtcttacattgatagtaaaccagagagaaactaaatattaaaatcagggctatcctttgccaaaatggcaacataacaatttaaaaaaacacatagaggattcgacaatttttataggtagttctacgcaaaaccttggatagggttttggttgaggtttactataaaattgtattctatcatggggaaaactggaaaagttttattggggggcaaagactaggaagaatgatctaaaatgttgacaactattttgcaacagggctatgaagggttgtttgcagtaagtttttaaaataaaggggattagactctgttaaaattacttcttagggcaacttcaacaaggacagacagacatgccctaggtcttcctcttgggcatcaagaatttggactcttcagtctgtcatacttatgtcttatactttctagcttagatataagatatgccagacaacatttatttaggaacaattgcacttcaatatccattttaaatggcaaaactagtagcacaaaggatggaagtacaacaacaaaaaaaccaccaagaaataaaaaaaccaaaaacactaaataaactctgaaaaagagtcatactgtatgtaaactaaaacatgaaagccttgttcagtacacaaatgtgcttattaggattcaaagtttttgtcactgcatatctgcaaataactagtgggtgtgtttccacaaatactgattttggtgtgtgggggggtcacacataagttttggcaagtgggaatgtatggactctgcaaatgaaggccaactgtattaattaatggcttagaaactgtgcattcaagtacatatctgattatgtgttctgtgttctgttagagcagcagtccttaatctgtggatcaaggcccttcgacaaatctgtatctctaaaatatttacgttatgatacataacagtagcaaaattagttatgaagtagcaacaaaataattttatgtggtgatatgttgtttatgatctaataaagccactgaagatcagactgtaaagctagctacagccatagaaactgggcagtggtggcacatatctttaatcctcggactcaggagacagaggcagatggatctctttgagttcaaggccatccaggactacatgagagtgaatcagactaaaagagaaagagagctcttgcctataatcccagcactagagaggtatacaagatatgagcaggacattcagtattaggcaattagtttccaaccatagtgaggacaggatcccccccgccagcccttgttagaggtaagagctctctggtagcttgactagctttgcttctgatcttccatggctttattagatcacaaacaatatatcactaaattttatggtgtgtgtggggatcaccacaacatgaagaattgtattaaagggtcacagcattaggaaggttgagaaccactctgttagagcagacagaaatgagaatttgtccatcatctacacaatgccatacatcatgtgagacacttgcacgtaatgtctctcctttttacattaattcttgaagtttttactaaaaaggaaactcagaataaacttcatgtccgatttttttttaacctactgagtttagcctgtgctgtccatatattcagggtgtcagggcatgcactggagcaaggtcaaactacaaggggccctggctttgtagaaaactgaatcttcttccccagaagctgttacttgctgccaattgcttctccattagggggtggggctctcttggctggaattttgactggcttaattttgttcaggcagtcacagctgttgactgttcatgagcacagctgtcctgatatgttggggagatactgttttgtcccactaatccccaaactgtggccttcacaatctcctccttttccaaaatggtccctgaagatcatagctgcttcttttcttattttaaaattagtttttactttagtatatctgtactgtatttatatcatttcccccttcttcttgcctctcccatataacttcagctccttctcaaattcatggaatcttttattacctatatcataatgaataaatctatccattttgggttggggatttatctcagtggtagagcactaccctagcaagcacaaggcccagggtttgatcctcaggtctggaaacacacacacacacacacacacacacacacacacacacacacacaccatggggttcatctctgggaaagactggctatcttttctcagtagttattaattgtctgcagctcttcatctagtggtattattcaggtcttgttcaggcaaccataatgggtgtagcttctctgttatatataaaaggcacaatcgtacagcagttgctctggttctctggctgttacagtcttgccacccttgcttctgcaatgttccctgagccttaggtataagggttaggttgtagatgtaccaattaggacagggcaacacagtcagttgttcccttcatttccatcatctgtggctttctgtaatgatctctatctgctgcaaaagggaatttctttgataaggggggagagctgcacttatctgagggtataaggatacatgtttagaatgcacttagagattacagtggtttgggaaagtggcaggaataggttctactctaggttccatgacctcaccagccatgggaagttggcttggtttacactgttagacatggattccctcatattgagtgagctttaagttcagttggacagcagttggttactgttcacatagaagggttactattgtacccttaggattatacaaggctacttcttaaaggaactgtggaataagctcatgctgtttctcctggtagtgccacatccctttgagtccttatcctttctaatgttgtgtgcaatgttcaagctcactggcaatacaggcctgcaaaaagatggctgtttgcccattccctgtttctaagagtgtgaacattagactaaatcgtaaggttgctaacaggcattacctttttgtggcctttatggtatagtgtcaaacacagcagattctgtgctcatgaaaccaaggttgactgctttagtttcctggtagaggctttatgaatatgaaataggcatggtttgaaagtttatatcacagattctcaaaaacgaggccattatcttctttgccacctcccattagactaatgccttcagcattccagaatgtgtgtggatgtttcctcttttctctttgcttttgtgcattgctggcatatattgtgtctccctgaagcataaagtccccttgtcatctagttctgtccttgaactgaacaaaatcctcacaagcgggccatgagttgagtcactcgcctctgtctccagaggagttgatctcccctgacaaggttttgtctggttctagtggcacagttagtgacagcccaagcatgtagcagcatgtgacctggctccttgctgaaaactgtgtagtcgtcagaactgtcacacagtcagaacaagttaattctatgccagccgaagggcaagcagcaataatacagggcctctggagagggtgctctcaggcagtgtctgtagccacccagctgctctaccctgtggcagagttgacaggcagcatgggttccagaaacctatggaaaagacttggcaattttctgtcagatgggtggtgctatgggccctgttagctataatctgggaacagctatttcagcagagaccatttttagcttaaagaaaacccgtctcttcatggcaaagacagaaaactgctcttgacccttccctactttggttcttgtttttctctccatagctaatgagaatgattattggttagatgcatatttgtgggtttccctggagacagaggctgatgagctgttggtctcattaaagagtatttttgcactgtgttcttaaagaaaaccttggtttctgatacaaagagagatgtcctaaaagaagttcacactatgcctatgaagcagctaagaaaagcaacacaaacacaaggctgattttctaaaaagtctgaaattatggtaagtaagatttagtgaattatatgtgatgtcctctaatgatcatgcctttgctatgttctttacatgtcaaaacttgagtatcctttaatatttagaagaaaagccccctttcaaatgaaggagatttggaactttgaaaatatatttctgtatacatttagtgtatttattgtacagtatttgaatatggccccttgtatttttgtccttttcattatactgtgacattggttaagagtcatgtcctgttggtaattttatctgcaatgcctcagagatgtctaccataagtgggatactaagtggatggctgaagtcttcatgaaggatctttgctgatgaagtgtggcatgggggaaaaattgtaagcagatgaagagtggaattcaatcaggagaatgaaaaatgattaatatttgcaataaaatgtatgactgtgatatcctgaacccctaagaatactatcaagatggcggccagacatttgaaaagtgttataggcaatttaaaaattaaaaggacatttacaggctgtgcttaccacagtgattgggacagatggtgtgaggtcaacacatggcacaaagcttgcatgctactctgtgttctctgcttgggatcatgatctacagagagccacatgggggagaggaaatataaaattagaggagagaacttggccacattcagtagattcaaatctctgggacccagatcaacataatataaggttttgaaattggtgcttgggtgtggacccaactgtaagaaaaatgatagtctgttgaaaatgacatatcttctgattttcaactgtatttcctccatttcttctactgaattgttgactgtttcccatgctattgaatggccaaggtcctctctttctagggtagcctcttcccatgcattctctatatgggagccagggtgatgagaatctagtcttgttacttcattatcaaaccaatgcaactactttctttcatatatgacatctgaaggagtgttggaggacaaaggagggtaaggggagatatgaatgaaatttataaaaatgacattatattggtcagaacgctctaaagaaatacaaacaataacaagaacaacaaacacacacaattttttaaatggagatttattcagatggattacaggatgtggtctgtcctggtagtccaacaatgattatttcccactacagatgctgagaatccagtagttgctgagacatccaaccttctgtttgagccctgtcttgtggcctggctggtacccacttcttctggccttatctagaaagcctcctatgatgactgcatttgcttatcatcctagttggctgcttctaatgtggctttctgacccaccacatttgtccatcatcacaaatcattatattttaatctatttgtatagaatctcagatgagagtggaagagaaccatgtttatctttttaaaaagaggtcttttattagaaccattcattgtacacagtgatgggtttcatgcagaaatttctttttaaatatatgatgatgctttgattatattcacggtcatgtaattccctctttctagtctccgggtttcctgtccctagcattcatagatcatctctcggactggctttactccacacaggtagctcttcattgtggatgtgaagccatgatcctgctaactccaatatcctgaggtctccaatgcaccataggtctcacttgcacagttccatacaacattctcttcagggttccttacagggaatctgaccctatctcactttgtctggcctcaccctctattagtgacccccttcaatctttcatatttaatattttcaaactggaccacctgcatgacattgccaagaatggagcctgcctcccgggatcacagcttcattgcttctgcgtgtggaccctgaggaaattgtgatatataaatatatatatatataatattatataataaataaataataataaatattatataataaacatataatataataatgtatataacaaatgcagctgcttttgagaagcagagaaccttcccaacttagacttactattttttctttaaatgaatttggatctttgctagaggtagcttcctacccagcacatcacaggagttttctctttagaggtattgatgatatctttaacaattatggctgctttctcagcactaatatgaatgttacctagtctttaaatttcctctgtcaaataaattaggctgttacctttaaatcaatttaccactgtggataatcctgtacactgtgactatgtattactctcattggttaataaaaagctgacaggctggtagccaggcaggaagtataggtgggacagccagacacagaggactcagggaggaggaagggcagagtcagaggaggtgccagccagctgccaaggaagcagggcatgtagaaaatgaagtaacaagccatgagccatgtagagaaacacagataagaaatatgggttaatttaagtgttaagagttagctagtgaaaagcctgagctattggctaaacacttataagtaatattgaactctcgagtgtttatttggggactggcaggtgagagagaagtgtctgacttcacctcacactggcagaatgaagctagattcttgatcaaagtatcacatgaatatctattttcagtatcagataacatgctcagaaatagtgcctatcatgctcagacagacaaactcagacaagacttctacccttctcattattgtacaggtctgactcaaaaattccctctactgtctacagatattctacagatcaagttttagagtgtagttctgtggttttgctctgggttctgagagtgtacagtttagtgaggaccttttacctctagggctgtcaagcctgtgggggaaaatatatatacacacatatgttatacatgtaagatatcaaacatatttatatataatatatacatgtattgtataacaaatacctaatatataattatatataatacaatatataatatattacatgcacacaaaacaatactataaatatgtatatgacatatatgacatgcatgtattgttacatgtgttacatataatacatattatatataatattacatgaatatcacacacattatattcatatatactacacacacacacacacacacacacacacacacacacacacacacacaacttcttgccactgttccagtagaggaagtttcctgatgtctctgttcactctgaaggtgcaagtactatgtgcagattttgtttctatttctcttttgctgctcttaaattctttttgcactgacagtataatgcagattttctaagattctctgtgtcctgcacttgcaatccctcttactccccatagataattcctctgggatagatttgggtctttttcttctgttcttttttcccatagtgttccactttattttgctattaaaagtagagattttctgtcacttgcctcttgtgatagcggtcatccaatgatctcagttattccccagatattctagccgaccatgcatctgtatcatctgccaccaacataagagaaccatgtttatcttacactccattctctagcaaagtatcacacacaaaagggaggcacattgtatatttttccctttaaaatctttttaggttagaatacaattaactgatttaatcaaggcaccttcatatatatgccactatacttagttctcaattatccccttttcctattgccccctcctgtacctcaggcctgtagatgatccctttcctccctgttatccttctttgctgtcttcctactatatgcattccgtaacattccatattccatctcccccttggatctttttcttgggatcctatatccatattcatgacctacaaataaaagtgtatacacacacacacacacacacacacacacacacacacacacacacacacctcttcaaatgtaggttcttcatatgagtgataatatggtactttaaaaatctgggttattgtgcttaacatgatttccacttgtatctatcatgccacaaatgttacggctacaataaaattccattgtgtctaagtgctacattttctttatctagtcacctgttaatggagatttaggctgatcccatttctttgctattgtggttggtgaagtaataaacaaagatgtttaagttccctttaaaaggatttattttatatgtatgagtgttttgtctccatgtatgtgtgtgccttggtgtgcaaagatgcctgatgaaagtgtcaggtcccttggaactggagttatggatgtttgtgaccctccatgtgggtgcttggaatagaaccccagttctctgtaaaagcaatgagtgctctaaaccacctagccttttatccagcccctctttgtatttaagtatgtaagcatgacagttggtctaaatgggttatatggtagttcctgtctcattccagattttagaagaaatgttatcaggttttctccattaattataatgtcagatataggtttgatggatacagtctttattatgttgagttatgctacttcgggttccttcaaatattttcttttcatgaagaaatgttgaattttgcttagtgacttttctgctttgagaccattatttggtttctgctctaaatctatttatatacaaaattatacttacaggtttgtatatgtctagtcagtcttgtactcatggaatggaataaaatttgccattattattgttgttgctatttcttcatcctctccctctattattattgttccttgctattattgcttcctcctgcccttcctcttcctgaaacatgtctcactatgtagtgctggctggcctgcagctgactatatagactagcctagcctggaattcaaagaggttagcctgcttttgcttcctgagtgctaggattaaagacatgtgctaccaggtcagacttacagagatgttcttaacatgctcttgaaattgatttgcatgaatttgatggaaagtatttggatctgtgttaataaggggaattggtccacagcttgctttatttgttgtgtactcgcctggctttagtatcaggctaatgcctacttcatacagtgacttgagtaatgctgttttcctttgtatatcgtggaacagtttgaagaacactggtgtttgctttaaaggtttggtagaacttggcagtgaatccattttgttctggtcttgggagtctttttgctattgtgtcatttttgttgattgttattgatcttttaaaaattgtttttgtcatctcaatttaatattgtaaaatcatatttgcataagattctttttctagattttgcagttttgaaaatatattttcaaagtactctaataattctctgtttttccttggactctgtaacaaccttccctttttcatctctcattttattaatctgggtctattctcctttggctagtttgagtacagattttttaattttaatttttcattccttatgtcagtaaatttaggtattatttttttcagttttcatttcataattctgccctgatctttcctatttcttggggtttgtatttttcttttggtacctagaggtgtatcattaggttatctatttgtgatgtttctgatttttcaaggaaataatactcacaactataaactttccttttagaactgctttggctgcacccaaatgtttctgctttcattctcatttgacagtaggaaaaaatttaatttccccattttttttcagcgaccgcactagtcagtcaattctgtagtgttttcagtgttcatgtgtattttgtagtttttacagtttttcttgttattgacatctagttttaatattagtgatctgatgagataaattattatgaatccttgtggttaataagacatgacttatggccgagaatgtgatccatttcaaaggaggtgccatcagctactgagaaaatgttttgtgtccatagcatattctgtaaatatctgtggtaaagcttaattttggggtttcttgattggcttttagtttgggtcaccaatgtagatatgagaatgtggtattgaaatcagccactattattgtatcaggatctacctgattgtttttgtgtccattaatgcttcttttgtaaaattgaatgccccagtatttagtacatgaacattttgttttcagtctactttatcagacagcaacagacacacagtttcacttgataccttgttcccactctttgattatctgagggtgtcttcaccagtgaggtgtttcttgggcacaaaagaaagttgttgtctatttcttaatccattcatcagtgtctgtttactggtaaactgatgctgtttatgtatgtttattctgagaagtgtttattaattcctgtaatgtgtgtgtgtgtgtgtgtgtgtgtgtgtgtgtatgtgtgtatgtgtgttttggttggttgggttattgtttgctctttacttttcccctttttggtgtcaaggtcttgcttgttttctatgatggactccttcctagaccccctttttccatccattcatctcctgaactgtattctttgtgttgttttcaggatggagactttgtctcttcctcctctgtgtaactagaactcttgcagtgctggattggtggtcacgaactgctttagtttgtgcctgtgcttattcttccattgatttaaaatgatgtctttgctgactatagctctcgtagttgacatccatgttcaggacttgaagtatatacatcattatgtgcttaactggtttttagcatttgtagtggtttgactgaacccaactccctccatataagctcatatattttcatgcttattcccacactgtgaactgtcaggaaggattagaaggtgtgacctcgttggagtaggtgtgtccttgttggatgttgtgtgttgttggggtgggttttgatgcttcaaaaactctttctatgaatgctgtctgtggttcagaatgtaaagcttttagctactgctcttgtgccatgattacttctctgccatgacaataatggactaaccctatgaaactgtaggctaactctcagttaaatgcttccttttataggagttgccttggtcacagtatctctttacagcaatagaacaagtgactaagacctactggtaagaaatttgatgctattctcatatttatgcctttataaataagttgtcacttttacttttttttgacatcttgactataatatgttaccaagaggttcttctctggtcatatctaattgcctcttgtagtttaatgtctatttctctatatttggagaaatttctacaataacattgctaaatagattgtctatcctttactgtttattttagctccttttttttttaatcccatggattcttaggtttgatccctaggttttatcctagtttttcttatttatagttatggtggcttgaatgagaaatattccccatagtctcagccatttgaacacatggtctcacttagtggtactacttggggaggtttaggagatgtggctttgctggaggaagtgtgtcacttgagggtgtgtgttgagaagtttaggcctcaccccgtttcagagtttgctctctctgctccatgcttgaccgcttagcttctggttcctggtgccgtgtctgctgcttgttgcaatgtcattgctccaccatgacaggatttcattcctctggaactgttggccaaaagaaactcttctttcctcttaagcttcctttggtcagggagtttttacacagcagaagaaaagcaaataatacaatagtagagtgcagtagtttgtcaaccgtgtcctccatctttcttctgctggcttcagtctgttactgatatttttcactagtttttatttgagtcactgagtttctacatttccatcattactatttgatttttttaaagtgttaatttccttgaggaatttttccatattgttcattttgtcatattttacaaactttcttctccatgttgctggctgtcttctccaggtcctacgttgaattcaaccacttaatttgcataattttgagtcagtaatcatgcttattagtaagactcgctgaattagtaaacttttatgtcttcatcaataaaatgagagcactgaactagggtcccaaagaacttttttttttttgtagttctcttactagaaaataaaactgaaagattaaaaagaatatttactttattgaaaaaatagtgtacttatcacatgttaatgtgaaacaaattttatgaactgtaattgcatttttataaataaaaataaattaagaacagtattttacattttttcaaataccttatcttagtggaagatagctataatttcatatctgcttttgaatttaatctgttgtttcatggaaacatatgaagaaaagtaggcatccatactgtgattcagcttaggggcctttgctgagtgttggtgccaggctcttgaactttccaggaccaagggctatgagctgaataaaattctattgcataaatacacacacacacacacacacacacacacacacacacacacacacacacacacacacacacacacacaccctgcctcacacatggtgctggaaaagagaactattttaatagcactttcctaataattttggatattatgttaggatgcaatatcagaactttgaagtttctctaaagttagctgctctgtggtacttgaagtcacattaatgagcttttactacttgttgcatcaactccattttagtgtacctttcaccatttttcttttaaagatacgacatcaccaagtagccaagggcattcttgtactttgactctgcatcagcctcctgagcgctgtgatgtgtagtttagtttcagttaccttttggatagaacaccatccaaaaacaacttgcagggaaaaggatttatttggcttacatttccatgtggtagtctattattaagggaagtcagggcaggaattcaaagcagtaacctggagatagaaactgatacagagaccatggaggaacactgcttactgacttgttcttcctggattgcttgatttgctcccttcttttctttcttcttctttttagatttatttgtttatcatgtatagtgttctgcctgcatgtatacctgcatgcaagaagagggcaccagatctcattacagatggttgtgagccaccacatggttgctgggaattgaactcaggacctctggaattgagaccagtgcttttaacctctaagccatctctccagcccagtttgctttcttgtacaaaccaggatcctctgccaagggagtgcaccatccacacaaggctgaaccctcccacatcagtcatcaatcaagaaaatgccctacaggcttgcttatatgccagtctgttaaagacatgttttcagttgaggttccctcttcttggatgattgaaacttgtgtcaagtcggaaaacaaaacaaaacaaaacaaaaaccactacaacaaccaaacaaaaataaacacacagttaggttgtcaggcttgtcatatatgattttagaatctttggaaaatattgtagtgagatatccaccccgattgcacctgtagcaccgaccaagcctgtttgggcgttgtcactgtgcagatgtgatggagagtgagtttaggtctggggtccaggcaggtggctctctcttgcatctggtcaggtcacaggggtagccatttcagatccttagagcaggaacctgtggtggccttctgcttcttgtgtaagtgacttctcctggaaataaattatatttaacctatatttgagcctagtcccgtgaatcattatccgtgaatattgtttactgagttatgtggcatttgtaaatactgacattctgttatctcctaaacattcattaatatcattgagttttttgggagacagatgttttatgtagggtaggctgaccctaaagtggagattgtcctgcctcagccttccaagtgctagaattatagacttgtgccatcaagtttggctagtattatgcattttttttgggaaatctttaagtatttagaagttttaaagctagtggtagaatctaaattttccaaaaaaattaaatttctggttgaaatctaacaagttcttattggtaataaacagtgccacttattttctgggggagtgacacactcactttttgaatagctgtagtgtgactgccaaccattctttcaagttaaatgttcaatgacaaaagtgactggtacagattacaatccaaagagctgcttatgtgactttctgtgagataagtgtcacttttgaacatgcagcaaaaacactttatgcatggttttcattttgacacatacaacattaggaagatgtatctttaagaggttatatttaataactacatttttactgcttcaccaaagattttgagacaaatccattttttcttatatcctgcccaacaacttaaaaacatgaattgataggtactaaaattccagcagatttcatcaccattgattctgtatagctaatgcaaatggcaatgaataagacagtcaacatcttagagtttttacaaaaaagcttttaaaattacttttaaatattatagtataattaaatcatttcttcctctcaaattatcccacaaaccctccttgctctttttttcccaatccataccctcttttttcattaactggtgtgtgtgtgtgtgtgtgtgtgtgtgtgtgtgtgtttgtgtgtgtgtattgttaaatacaatagcctgctcagtcatttaatgtttcttatatgtatgtttccaggcctgaccatttggtattgaatgaccagttggtgtactcttccctgggaagactacttctccacctctcagtattccttaattctttgtgtggagcttaggcactgggaactttcccttgtccacattacatgtctcttggtgccattcttgtccagcctgcatttaggccatctgttggtgagactttatgagtgtagctcgtgacatttcagggagacactgtctcacagcaaagtccctgtctgcctgatcttaacattttcctgccacctcttctgcaatagtccctgagcattggcttttgatcccttcagtctgcctgatggggtttcagtgagatgccagtgtacagaccattctttaagaacaaatcataagaattacattatgttactcagtgatgatcttggaagaagagagggcatgtgatccaatcgactgaaacttgacttcatggtgcatgactgaggttgtcaccgatctcgtgagttgtcaaatttagttcattcatatcttcatttcccattggtctttccaattccactggtgcatcaacttaatgttatgataaggattgtcagataaaccccaaatcctctgtccattttcctagatagcttcctttgattagatatgactgccagactgtcaactatgtcattgcaaggctgtactatataatgttcaagctttcttggcactggttgagtggccaaaagccaatggatggtaaaatgaacctgggaatgacctgttggagaagaggtggctgtattctgaatgttcccaaacactgttcagtaatacgcaagatgccttcctattgctttgaacctcacagtttaggtctatttattatagcaattagcctttcctaacactggcttgagtaataaccttttaattggaattcacagtgattcatctttctcaatgaaatgtaaattgaagttgtactaaaaggctaacatcattaaagccttcttttcacagagatatactggaaaagaataccctttttaaatttatgacagattttccttgtgcctctcagcaaagatctggttccaagtaaatggatactacaaggagtaatgaggaacaaatatttgtccccgaaacctgtaggagagtgattgcattattacttacatatgctccactttgagatacccaggggtgtagatagggaattaagcaggaaattggaaatgtattctatgcaaaatagaatgagaaaagtaattgaagataaagtataaataggatgactaagaagcttgagaagtgctttcaaataatggatatggtttttcaagggggaagtaattgagttgattccaaatttaaagcctttaaggaattgattctttccttaattactgatctttctccttggtttgagaatgtggtgctcattttcccctagtgtcagttagagacacaattacaaaaataagggattcgatcccacatggcattaaaattttttcttttcttgtatttgtattcaatgtaagtaacattcaaagcaaataactgggtcattttcacaaacattattgtgcgttattatgtcttatgcacatgatggacatgacattcaaggatgctgcttccattgattctccaatgatcatttcccatcttaactatcaggagagctcaattttatcagcgaatttttcccttttaaagataccacattagaattaaattaccaccaagctacttggaaaaaaaggctagacacacttgtatactaatccagcaaacattcattagctcactaagtatcatatggtagtcccagaaatatgactataggagcaactcctgttttaagtgctctcacaatctcattgggatcggaatacattgtaacagtgagctgggaaagataagcaacagccctcccaaatcccagtgacttaatactataaacatgtatttcaaattcatatttcacttcaaaggagagtaggagtcttctttttcttaggtaattagggatcattcctttaaagtttcatttcctcatgtgatccccatcatgtgactaagaaagaaaaaacatggcaggttgcactctgacttttaaaagataacacttcaggatgtgtagaaagttcatgaacaggaatagactgtgcaactacccatgtaagcagacaaatacagtgcagagaatggacatgcgttcagcactaggagaggccaggtggttgtaactgttaaaatgcaggtttgcacaaatactgatcaatgctggcatgaatggagcctcctgtttgggcatttactatcaaagcataactcacagagcattgccttggcagtctgtttacccccgctcccaccacccccaacctcctggattccctggactcactcaggaatcgttcctatcttgctcaaggcactcaactcctgcctgttcagtgatttctttagaatttattcgttctgaaagagtgcagttttcacatgcctatcttctctttggacagggcatgttttttgaagggtagcatggcttaggactcagaagccacgtaagtaccgctaactgaatggaggccccacagaagccaaattaaagttctctagggtagaaggggaggggggcactatggactacagggtaccatgctccaaggcatcccagtttcccataggaaactggaaatcctgtattcattccttgcctttaaggagtttttactcacccatagcttaatggccattttttttaaaggaaagtgaggaagtgtgtttactttacaggctccgtgttctcttgtagcttttatgaactgcaatcaccagctgggccaggcttctacactgtggagaaaatgtccacaaggggcaacaaccaggccactgcttcattttcacatgtgattcgagcccaagcgctaacctttctctagaggactagatagtgcattaacacctcaaatcactccactgtccccaggccacagtggtatctgttgcttcctagacctgagtgtatctcccatttgcttctgataatcacatagcaggaagtaatttcaaacagggggcagggctgagagaaggaaggaggatggacctctcatagacagggaaaggttttctttgatttttctttggtacccagtccttcacaatcacaaggcaactgcatttgggttctagaggtcctaggggtctctctctgtccccagatatgcccccaggagcccactgaattactaggcagctgctgagaaaaatggctgggtttagctgctgcttttttttccagggtgggagctacggatccttagtcagatctcttaaatcaaggcttagtatgtgttggaagaaacacactatttgatcagggattgttcactggcgacagaattgaactgatcaaaccaaagcagatggcaggcctggtctctgccccttaagcacctgccctgactaactcacagagacagctgatgtctccagctcaaaggaatgctctggacatgctcttgaatatttcataagacatgaggactttaaaaaatttttttttctttacaacttaggatacaatcctaacttacaatcataattaaataattccttggcatacatattttatccaatgccattcgtttcatttctcacagtgaagaagcgactgacaacagctcactacttttcactctgcccagctaggatgcaaacagtttagacttgcactagtcattcctggttatatgttattatttgaactgagtccaaatgaattaaccttctcagttaaactaagcataattaagcatgcagctgccattttggatgttttcaccactctaggatcttctgggcagtacaagtttagaccattgtttccaaggtgggaccagattaaaccatagggtttacaggacaatccctggtggaaggaggagaaaacatctggatttggggttattctgtctagttctgggaagcagactttgagatggagcttatggctccttactaactgagaagataaaactgtggtgaaagagtggaaaaatcggagagaatgagtggcagatttagggctgtgggtagccttcactgacatctccaaggagctctaattttgagtagctttccagagctctaagttgctaatagtgaacacagttcttaatactctgagtcacccactttttaaatgcaggcagtccctggggtgataagagtcaggagtctctccacagtagctgggggaaacatatttcagtcctgaaaggtaattggtgcattggaatatctgtgccattttgtgttcttgtatttgtttctagaatgtttggatgaatggatttaccatagaagtttgtatagtggagttgagttaaatatgctgtactaattagaatctacaaatccaaagcttggcaattaactggtgtagagtctggatggaaaccagctggctcaatttagcagcagactaatttgtccaagatttcctttaaaatcatgtgcaaatgactttggctttggcttgttcaaggtggccataggtctggcctcccactgttgtcttggacttactgacttcaccccttttcctggcctgcctgagccccgatgtgtttgagtaggaactgccttgtctgcataggttagtagaagatattacagcagatgaactcgggtgtatcttcttatgatgtaattttattcattaaaaaagtaaattacatttattttatgtgtgtgtatgtgagtgtgtgtgtgtgtgtgtgtgagagagagagagggaaagagagagagagacagagacagagacacagagagagacagagagagacagagagacagagggaaacttgctgaagtcaactttctttcttccagacatccaactcagggtgtaaaggttggccacactttcacctgctgattcatgttgctggtccatttatttatttatttatttatttatttattattttaatttgctttgtgatcctccaattgagcaaagacggttcagaatgcttttgtttcacttcatgctacagtttacagttataattagagaaaggggaatgtctaaaatggaggaggtacagaaacagccccatggattggttagcttgggtttgccttattccagcctggtttatgttgtcagttgtgcatagctgaatgaagctggctgctctaattgaccagaacttggctacgtgttaccgtagtaagtcatagtctgtttaggttacagtttatgatggatggggggaacctttagtctaaaattcagaagcgtagggaggcagctctaggtaaagcctcattcaagttaacaattcattcagtgacagtgtccagtgctgaaagaatcagagaaaaatgaacagcagtgaggaaagagaaggaattcaaggcacagaaggagaaaagtgtggacctaaaatgccatgaagtgatactgggcactggttttagaacttaactcatatataacattttcctcattgcacaaagaagtgaaaaagaaaacaaaaccatcccccaaatagcagtaaaataaatcattaaaaaaagcaaaacagtttatagagacctaggtccatctcctggggaagaaactaatatttattcagcgttgattttatttaactgtcttgagtcatggtctggtctcactatgtagcgtcggttggccttgaactcactattttgccagagtttcccttgaactcaaaatcctctcaattctttctcccatgtatggggattatagatatatatcattacactagtctatatgttgagaagattgatagcattttttattgctgttttccagatggcttaggttactgttcagcttttgtgtgttgtcaactcaggtttgggaaattgaggagccattgacagtctttcatctgctagaggatgctgacactgaggacctcttttggagacaggcatggactagagagctgggcagcaggatagctctgagtgtggagggcctcagcgcctcactcccaaagtcaacagaagcacacacacacttggagccttcattaccatggatatttctttgctgctacttcagctaaatttagaaaactggatttctttcaaccttcagacacagccctgttatgctctgtagcctctttggctatcctgaacatcactttagactctcaaactaattagagaaatgtcaccgcagttagcatcagttagcacaatactttttaatcattggcaattagtaaacatttgacctttgcctggggagggggaaaacagtaaatgggacataacaaggtgaagcaattcacagcgtctgtgatgatgtcttggtagcattaccacctggccacagagttcatattcaacctgtctccttcctaaagaggaggacatggaggagttagttatgagcaacagccttagggaggttctgcagaacagcacaggccacaacattgtttgctcttttccatatggcatggagttggaaactagattttgaagtagaagtctgaaatttgttctctgtgtcaagggcctgggaaatttccagaatccttgtcttagcaacttctcttggcattgtgacaaaacagctggtaaagaaaaagaaagggtgtgttttggagggagggtggtggtggtggtggtggtgggggatcagagtctcagagggttatagtgcaccatagttgggaaggcatgccagcaggagctaatgaatccatgatggctgttcacatgttggcaggtaggaaacagagatatatgtaaacttcagtctccacctcgtgataccaatgactaagtgactaccatgaggccagaccctacctcctaaaggctccacagccttcaaaataatgtcataagatgagggactgagcattcaaaacaggagcttatgcagggatcttttacattcactcacaacaatccttttcatcattcctgcatggtgctaaaaagaagagttttgtggctaccattcctccaaggtttcctacttaacacacacttctcactgtagtttcccaattccattgttgtatatagagtctcatttaactacttaacaaacccaatgaaccgccccactttagtttcagttgaattcttcccaagtccttccttctgccttcaggaagtctacattggaagaaagccatggttatagttccaggtgattatctgggcagggtaggccttgatgacaaatgtagatgccttctctttctcccatgcgctctgtgaactaggctgctttggtttgctctgttctctgttgtaagcactagcactttgaaagttggcagccgtggccagtgctctgctgttcttgacaagcagagacagatccttatatattttttcaaaaatggcagtcagtatgatatttgtatggggtcagggggcaggcaagggcacctgtttggtaaaaatatcttcatcatcaggctttcagaaaattgatttcttgatagtgaatagagagaaggtagaatttcagaagcaccttaaaaatgagatatgggtagatgcccccttctattttatgaaatccattcatctatccgaccaaatttaatattcactaaacccttgtcagaaaaaccataaatttatcatgctgttaccatcataatgctgaatagcagcctgtcctgtgtccctgttctgtgtctcctccagtgcttgtctctgctaccttgctcatccactcatcctgtgagtgctcccccagtgtcatgtagcttacctaaagcaggctctgatactcacttgctgtgccttgtcagttcaaatcaagtcacagcggttccagcccaccctgcagggaagtcttgacagctctccttgtcagcatgctggccgctgacagccagcagcagtgagtggtaaccagtcaattagcagtgacaactaccaggttgggagttttttgtttaatgtgtagttaatttcacagtaattgaatttaggcttggcttacagcaactggggcgaaaggttctgtgtggagccccagcaatcttttgcaggagactgaacagagctattgttttaagagtagcctggtctctcccaggagccctgtggacatctggagacctgcagtttcctgcagggggctttgagtacccgccagacatatagaactgccactccttccctgtcagtaggggtgggcattgggcttggtggtatctgcagtgcagaaggcaaaccaacctttactgaatgatttcttcatgctggttacggcagtgacaatactatacttcccccctccccatcctactcatgaagtgggtactataattacttagattaggttaggaaggtgaagatctgatacggtgaacaattttatcaataatatgaagtaataaataggttgagaatgtattttagataagtttctatagattgctgagaagcagtctgttggatggtgtgtatgtgtgtatgtgtgtgtattgtgtgtatgtgtgtacatttcacctggaatgtagtttgttcattgatttttagtttaggtgatataactaaggatgaaagtgcaatattgaagtcacccagtgttgttataacaagacctagctgacatttttttgcccactggtatttgttttgtggaactgctagccctgacactacatatatactacccccctctctctcacacatacacatataaataatatatcttatatattaacagttataatgtcttgatgacttgttgatcttataaatatattgtggccttatttatctcttacaagttttgtgtgatgactttattcaatactagaatagctataccagcttccctgtctttaaataaattgactttggtccttgactctcagtcaaggtaagttagcaatgagatgtgatttttggagacaacagatggttgaatcttgtttgttaattgaggcagttagtcggtgctttttttctgatgagtcgaggccatttatatttaaggttattactgagttaggtgtagtcactgctacaattttgttgattattacttttctcattggttgtattattatttattcttttttctcccttataggtataaaaggtttgctggtttagtgtgtcagacatgatggattccttcctgcctgttgttcaactcttcctctcataaaactcatttttttccttgtgctctcataaatgaaaccatctctctttcactactgtgtatagtattcctgtaagtacctgctgtagtggcggcttagtggtaatggagtgctatggctgtccttgtcttgaaatgcccttattcatccaacaagtgttaaagataactctactgggtataacatcttagttggtggttatttacttcaggaactgaaatatttcattccatgctttcctggatttaaggggtgcttttcagaaacggaatgttatcttaggtgtttgattttgtaagtgattggtatttttcctttctagtttatagttccattgtattttgtattttgccatctaggctatcacatgtcatgaataagttattttctggtcatatctgtttgggggttctaaatgcatcttgtatttgaatgtcatatttctcttgggttttgaaattctctgatatattttcattaaatagatggtgaaggtgggttaaaggaagtccataaacacccagataaatgattaataggaatttatttgtggagcacttgcacggtgatggtaaataactactgtggtcttcctgctcctggaggtgcagcctctgcccttcaggatgctctcaccacaacccaagagagcaagagccagcccctcctcttccttataagaggccatgtccagatacactgaagccacaccttaagttgtggccaccaccccaagtccactggctgagcaagatgccactacatttcctcttttttgtctaaataagaaggttttgccgggtgttgggggcgcatgcctttaatcccagcactcgggaggcagaggcaggcagatctctgagttcgaggccagcctggtctccagagcgagtgccaggataggcacttaatgtttttctaattggttgatgaataaagctgtttcagccaatgggcaggcaggatttagccaggtgggaaatccaaatagagataaaggtagtaggtggagtcggggaaattccatgcagctgcggaggaagcaacagacctgggcatcaccggtaagccacacccatgtggagatatacaaattaatagaaatgggttaataattgagagctagccaataaggagcctgagcaataggccaaacagtttttgttacgcagtttcctctgcgtaacaaccctaactatctaggaactcactctgtagaccagactggctccaagctcacagagatccacctgcctttgcctcctgagtgctgggattaaaggcatgcaccatcatgcctggctatgtatattttaagtttcagttttcttaccaaatctctcttccctgttgctaacttttccatccacattgctgattttgccatccattttagtaactttctctctgtgactactgatatcctttccaggtcatgtatttatctccttaccttgttcatctgcttctttttattgtttttgataacaaccttttgatgtgctcttcttagttatattttctgcatccttttgtatttaattaaaagtttctcgtatagggttgtgtagggtcattttccttcaggtatgtaatgaacattatgcatggtctcctctgattttggtggaagtgattttagtttcctcagtgttatgttattgttatctatctttactctcctttcttccattagtccttttgttcttcacagttttgttcctacttttaggctgtctgtgcatatatgattttatgtatctacaaagtctaggacccacaaatcagagaaaacaaacatgcaatatttgtgtctctgaaactgaattaacttaatagaattgtctctagttgtattcatttttgaataattgacataccttcattcttatatacacacatcctcattacatatttgcattttgagaattctccatattgattgccatagtgagtggactagtttacattctcaccagcagtatgataaaggttttcttttggtcatatccatgttgggatttgttgttgttaatgactgttttaatgactgctattctcactgggatgatatggaatctcagggtagtaaatctatatttctctgatagctaatgatgttgaacattttcatgtatttttggccttttgtttcctattttgagatctgtctgttaattttattaatacatttgtttattgttatttttttgttctttatagctattgatcctctgccagatatgttttgtcttagttaggtttctattgctgtgatgagataccatgaccatggtaacacttatataggaaaacatttacttggggctggcttatggttcagaggtttagttcattattgtcatggtgggaagcaaggctgcgcataggcagacaatggtcctggagaggtagtcaagagctgtacattttgatccacaagcatccagaagagagagtgacagtgggactggcttgagcttctgaaacttcaaagcctactaccaaacccctaagcttccttcaacaagcccacacctaccccaacaagaccacacctccaaaaatgctactctctatgagtctatgggggacattttcattcagatgaccacatgtaactagaaagtattttcttccattttgtaagctgcctctttattccattaaatgtttcttttgctgtatagaagcttttagtttcatgatatcttatttgtgaattgttgatattatttcctgagcaactggagttctgttcaaagagtgcttgcatctcaccatgtcttggatagtttcctctactttttttggctatcagttttagtgtttcatgtattatgttaagattttttgacacagccaggcattggtggcgcacgcctttaatcccagcactcgggaggcagaggcaggtggatctctgtgagttcgaggccagcctggtctccagagtgggtgccaggataggctccaaagctaaacagagaaaccctgtattgaaaaaaaaaagattttttgacacatctggaattgatttacatccagcgagtatgagacaaatctagtttcattcttcattatgtcaatactcagttttgctagcaccactgtctcgaggctgtcttttctccaatatatatattttttagcttctttatcaataatcaggtttctgtaccagctgggtttacttttgggtcctctgttatgtcccactagcccatatgtctgtttttgtgccaactaccatgctatacttgtctatagtgtaacttggattcttgtatggcaaatcttttcatgttgatttttttttctcagtattgctttagcattttggagtcttctgtgcttccatacatatttttaggattttttgtctgtctatgagaaacaaaatagaaattttcatggagattgcattgaatctataggttgctttggtatcatcgctgtttctcttccaatctatgaacatgggagttcttcctgccttttagtatctttttcagtttgtcccttcagtgccttaatgttttcatcatagaaatctttcacattcttgtcaaagcttatcagatacttcatttccttttttgaagtaatcatgtatgcatcattttctgatttcctgcttagcatttttttgggtattgatatattgtaagactactaactttttagtatgttaatatttaaaaatactacttcgtgaaaatgtttattaaaccttagagttttctcatagagtctatgtggtctctaatgtatggaattctatcatctgctaattatgataataatttcttcctttcctatttgtatctcttatttttctcttttctattgatagagcaagactctgagaactctgttgaatgagagtgaagaatgtccgactcctgattttagtcaaaatatcttcagtttttttccccattgagtataacatttgttgtgtgtttgttgcatttagtctttattatgttgaagtatattcattttattttaatttctcccatgattttagcatggaggaatggcagattattgtcaaaagctcttttttctgcactattgagataataactgtggtttctgtccttgaatctaaataatgtgctatatttattgagttgtgttgtgttgaaacatccctgcatttttgggatgaaactgacttgatcacagtgaatgatgttttgatatgttcttgaactcagtttgaaatttttttattggtaatgtttgcatctgtatcttccagggagatcgccagttttattcatgctcttgtttgtttctgtggctccagtatcagtgtaacactggctttgtagaaggaatttggaggtgtttatccccctttctatcttagggcatgttttgaaaatcattagtatttttctactgctattgctatatatgtaaaatttgcatttttggaaactttagctgtgccattgcctttggcaaaaagttgggatttcagtgttgacatcaagttttgctgttgttttgagtcaatattgtacagaaacgatcagccatatttctctagaaatgttaaaattattttcccacttgtctagtggtatgcagtgtactaaaataataaggtcttaccaacttcagcttgataaaataaacaaagtatttgcccaataatataagcagttgacactgttcaacagtggatccaagtgaacctgaactgtttctggttgggagatttgttaattctgtttcaatcttgttgcttgctatagatctgtttgtttatgacattttagtttgtaagccaaatgaatatagaaattattccatttaaaaaaatttttcaatttgttagaatatgatattaaagtattacccaatgagtttttgaatttcattggtgtccattgtaatttcatctctgatattgttcattagagttagttctctcaatctactatctgggctctgcggattgaattcaggcttcgcaacaagcacctttaccttttttttgtttgtttgttttggtttttcgagacagggtttctctgtgctttggaggctgtcctggaactagctcttgtagaccaggctggccttgaactcacagcgatccgcctgcctctgcctcccaagactgggattaaaggcgtgtgccaccaacacccggccctatttttattgtctgcattttcagtttgagtcaattctaggaattaaaattttcttttcaatttcttttgctgatctttcattatttttatgttttttatcttcatgaatttgtatattttctgcattttctcttggtattgattcctagctttacttcatcatggtcacatagaatacctgaaatttctggggggaggaaggtatcagtttttcaatggtgtagccactcatacgttgtccatccaataaataatctcccactcatgttcattgaagcaactctaattaaagccagtggatcacatacaaaaggatgacatgaaggttggaggggggcttggtgggcaacagtttcagcaggagttagatgtgtatgaaagagggtaatgaggatgggaataactaaatgtgcatgtattaaactgtaaagggtaaaaacatgaaaaaatatttcaattttcctgcattgaagacttgcttttgatattattgtatcatctctttcagagaaagttccatgggctgccgagaagtatgtgttttctgttgtgtttgcatagactgttacatagatatctattagattcatttgatctgtgatgtcctttttctctggtgtttctctgtttattttttgaaatgatgacctatgtatttgtgagaatgcagttattggaaccacctattcttattgtgttggggttgctctgtctttatatccagtagtgtttgttttatgagattaggtgctccagtgtttcttgaatacgtgtttggaattgaaatttcccttggatgaatttttccttaatcagtatgaagagaacctctttatctattctgactagttttaatttgaagtatattttgtctgatactggaatggcttattcatgttctcttccttgttccctttacctggaatatcttttcttgttctttagcccccaagattgtttttgagtttgatggtaaaatacatttcttggaggtaaaagaaaaagatggatcttgttttgtaattcaatctgctagtctcttttgattggggaaatttagtccattaatattcaaagttataaatgaaaagtgtgtataaatttgtgtcattttgtagtgtttgttaccttcctattccttaactagtcttctggaatggtttattagtttcagaagtctcctggatatgttgaattttctcttcagtctgaggattcattcaattctcttctgcagtgaaggtttactggtaatacattccaacagcttatgttttataatgtaaaataatttgtaaaaattacatttacatttatttattattctctctgtttttctgtctgtctgtctgtctgtctctctctgtgtgtgtctctctgtctctctgtttgtgtgatacataatagtgggaacatttacattccatgtcaatggactaccttgtagaatctattctctcctatctttaagtgggttctgtggattgggctgtggtcatcaaacaagcctggcaaatacctttacccattaagcaacttgacaggtccctgaagaatatattctttataccttcatactgaagttcttttccttctcatcctatgattaataagttttgtgtttgaatggtgttacaaagagctcatacattctcttcatattttctgactgtctttattgatgtctgagtattctaattcattcatcttgtcttttattctaggtagtttctcttttacttgatgtattttattggtgaagctttctattgagcttcttttgatttgatttatgaatttttcatgtctaaagttttgaaattttacttttttttactatcttcattgtatttgcttcatatatattgactttcctttttccttgagctgtttgtttatattttcttcaggttcacttaggagtttatttgcatcttgattttattaaacattcttataataattcttttcaattctatgtcttggtgggattcttatctaattcactttcactgggaaccattactgtgtaactggtatttttcttggagggtttatactgacttcatgtttcttatattactgaattgatatttacatacctgtagttttgctggttggatttttttattggctgtgttgtcatttcaaatatttcaaaattcaagtggggctaagttgtaggagagttgaggtgaatagtttagaacttaatacctcagtctctgtgctcaaggagttttggaatgttagatgcacaattattgtgtggctccctatgccaatgtaatactggccagttataaacagtggactatttaacttcagtaacaagtaaaggaccaacatgtcagcacagtattgtgaataatagattactgatcactaagattagcagtacagggaatgtaggttgggtattagtattagattaattgagaaaaaaatgtggtgggaaaaaatatccggtaggatttgggaagctgttaggaaccatggagtttagagattattaaattttatagttgaaaagtgaaacaaggagggcttggggaagagaaaagaataggggttggaaagagagaaaaatgcatacgtgtgtgtagggagaatggtaaaggcacactgtagtagatgggcagaggtgtttacacagcaatcaaacaatataactgagcaatatacgagctaaaaacaatattgttgcaaggtagttctaccaaagtgaagattaaaaatagaaaaaataacattaaaaatttaaaaataataaaaaccaacaataacaacaaaaagtcaaagtgtaataacaatacattagttttaaaacaatcacccagtcacagtcagtatttcttccctgttgggatggattttgagttcttttcttcccagtgatatttcatacagtaaactgtgctattgggggaggtgcagtttgcaattctagttgaaagctgttgagctacatgggggtgtgtattgttcctatggagttggggccagttacttttgggcgggagcttctgagttgaacaggatagttcctagttcccaccttgattaggcagtgtatgtgtctgcctgtgtcgtgcatggtgtggtaaggtatcatgggaacatttgagatgcattgtctcggatctcagtgacagctttgggggagtcatccacaacctaacagagtcatacctcagtcccctcgctttgtgttcacttagctctttaggacttttggcctgctgacttaaaatctgctgcagctattaggctgcactgttcaggactgtaggatgggattctttactgagggttcctgctaacagtgaccaccccaggagggggcctaccacaaccttagtgtcacaccgtagtgtagtccttttgtaggctcaaaggaaacaccccagactcatattgtatgaaacagcaaaaagtgttgattatagcacatgcatgtggggttggcaacaaaatggctacaaaccctgagaggaacatgcaggctcctttaaagcatagctacgggagtttcagggggcaattaggtcatctcaaacttaattggttaagcaagcattagttacattagtatatttctaattggacacatctgcacaagttttggagtgactcagaaggggactgctgggtttgcccttgagatgccacgaggctgacttaggccctctgtttttttctctctcgactctgaatgtaagggtatagtttctccactctgaatgtaagggtatagctggagtttctttccagcctggccccacagccaattagccccagataaacacacagagacatattaattataaactgtttggctgatggctcaggcttcttattggctagctctcttttaactattaacccatttttattaatctatgtatttccatgtggtcttatcttactggagaagggtccggacctgttaactccttcctcagctacatggtgtcacctcatagcctctttctgtgttctgtccccagaattctcctcgtctggtagtcccacctatacttcctgcctggccactggccaatcagtgttttattcatcaaccaataagagaaacataaatacaaaaggacattcctcatcaattaggatacagtggataaacaaccttttgttgggaaatacacatgtttgtccttcccagagaaatgaaacaaattcaagttgaaaaagtgggagagtttaactccttcactttgctttctgctctcagagatggatagggttctgtccctgttggctccaggatctattgcagttctcaccagctgttctgtgatcctggaatattgggaagggagacttcaagtcatttgatttctcctgactttattctatttttaaagttttctgttgccagcattactgcctatcacgtgtcctattgtggtctgagccaggtaaaacatctacatacttctggagaacagagacacatggacagttggagttggctggttggttagccagtctatctgagtcagtgagctctggttcattaagagataatacccaggcttgtaccctctggaattgctagtgctttagtggaagagtatcatccaagtgtattgataatgggacaacactgagctctatataggcaaacctgtctttaaaaacactcggtcatttctattggagcgatatggtggaggtgttcagttataccctgaagcttcacagtttctgtgctctacagtgagtctcacagcacatgctggttgcagaggctgatatacccactgacacacccaggctgccaaagccagagttatcctgattttatgaggctgttcccagtcaccgaagttggggctgccttttcctacttactttcctgtctctgtcaggcctcctgttacctagaccatggtttgttggtacccactcatcctgctttccacagctatctcccaagatgtctctcattctggagctctggcatattgaattctggcttgctggctttgtgaatgttaccccttgtttggcctctaggacagctcaggtttaaacagtagtcagaggacagtgcctagccacacattcctgagctggagggactgttggcccacttctattggaaggatcattgtctcagcaggacctatgactagacaggcttgtgggaaccatgagcttgccttgtgggttaggttggcgggcatttgagtagaggtttctgttcctggaactctttggctcacctttcttcattttcactgaactttttgtctgtcccctccccttcactttgtaggttcatgcagctctttctttttctttggagtgaaatctatttttctttataaaggatttattttactatccttaattatgggtctctgtgtgggtatgtgcccattagaacaggtgtctgaagaagccaaaaggatatctgatcccctggacctggagttaaaagtaagcacatgtgtgcttggaactgaactcaggtcctctgcaagggcagtgtgagcctgtagccactgagcaaccttcctggctctgttttcttatccaaatatttcttctttcttcagtgcatcacattaaggcagttgctagaagacactttagctgtttctctgggagaagagagagataataaagttcagtgcttctgttttttgggaagaaagtgatgctaagagttttaagttcaacagggaatgtggtcatataaaaggacatttttattacaattttatttgaaaattccatacatgtatacattaaaacattatcatatcccttcccccatttctccatccctgcccaactcccccaacatgtcctccttctaacttcatgtctttttcctttttttgaaagggggtaactagcaaagtctaattagtgctacccacaagtgcatgagagtaggtctactatccattggagcatggcaaacttacctctaaacaagaatagttctccctcctccagctactattcactgacaatagagattctataaaaggtggggccaggcaaggaccttccccatctatgttggaatgttgactggattaatcttgaacaggtcttgtgcaggccactatggctgctgttgagtcatgagtgcaatagccatgtcatgtctagatgacagcatttcatagcattctccatattccagctcttaaattcttttgcattttcttctaggatttccctgagctttggtggagagtggggtgacaaataaatgtcgcattaagggttgagcactcatagtcttacttgcagcactttactggcccagctatgggcttttgaccaagattacaataccaggtctgaaaatgcctcctgtgaggcaggcctcaaatctaatcagaaagtggcaagttacccatagcagtcaggccactattagtgccatgggctcatcttgtctggaaggttgatagtgtagcaggcagggttcagtgctggataagaccatgggtatctcttctttaccagtagcctgcatagcaccttctggcattatgaaagctagccagctaaagggaagcttcctgctggttcatatgaagtttcgactgtgagtatctccccccatctttccctcttttaaattttcacataatatattttgatcatgttttatccttcccccaactcctcccaggtccttcccagctacgcacgcacacacgaaaattaaaattaaccaaccaatcaaccaacccccccccaaaaaaaacaaattaaaaaaaaccaaaatgaaaccaaaagcccacaaaaaaaccatgatattcattttgtgttggctaactactactggacacagagcctgcctcagagtgtggtagataaacatagtggcactccattggagaaaaccaattccacttgtgcagctatcaattataaatagctttttggttggggccggacccttggaggcaggttgctgttatagttctcagggtctgtagctgggtgatattgatgattacctatgtcctctggtggcatgtagagtaacttctagaaccatgaatgctagtgagtaggaggaaagcttctagttaggcaccagctcaacttctctgtgcttgatgacatcattgaatattgtcttgagcaatcagattttactgtcagatgtggagagcaaccagttgctttagaaataacctgtgatgttttgggggggccctttggccaatactcaacaagttacaacccattctagcactggggtcctacttggtggcataagatgtctaggtggggcattgtctcttctattatttgatgactccatttagatttcatatatatatatatatatatatatatatatatatatactactgtagaagtatatatatacacacacatacttctacagtagtagtctttcatgtgtttttcttacaaaatggcctttagtattagttgtcctcccatatttcctcctttactgttctgtcccatccctcctccctatttaatcctcctcctctagttccctcttaatctttccataatattgtattctatttctgtctctcgagagagcatcttcttcctaagactagagtgggccttaaatccaaccaagcatcagtttttttttctaccccataacattcatatcatgattacatgcttgccactccagggttattgtagttcacatggttcatagctgggaaagacagttgttgagtttctcctccagcagtttgcatagcaccttcgggtactctaaagcttggcacttggagaagctttctgttcagtatcaacttgatttctacatgccatatgaccaaaatgtgtggtgtctttagcaatagagtcttaccataaaattgtggtggacaaccaagagcattggaaatagtttttgttgtttgtggtctctgacaccactgaccaacagcttgaggggtggtatgccatgacctgtactgggctttttatttaaccaccagtgtcttctgggagtaccatcattattctctgtgtagaggaatgacaaagaaactacttgacattaacaaatcaagctgaagcttataaaatagtagtttccacgtatcttttccaacagcctcattgctggtttctcttctgccatcctttcctctgccttacccctacatcaagttttgaattctttgttttatttcttcaaacatatccagtatttgatatattccatatttgataagctggttgttatttatggattcttgttcacaatacatttgtacctttacatgtttttgtggactgcattgtgagctcatgtctataagaacatagagagaaccatttgacgattggttgacagatactttggccacagacctggaggaactttcatcttgggttcacaccatgtgtaagttttgccaacttgcttggattaagagatgctgaaaaagtcagcaaatcacactcgggtgtgtctgtgagcattaacagagaggattaggccatgaggactctgactaaacaatatgctgatggattcaaaatttcagagtagggtatagttaaagttgttggggatatatcttttgaatgtatagctgggcaccagcccgtttctgtttttcttctgttggactgccatgaagaaagcatccatatttccactgtgacttccctgcctagatgtttagcctcatcacaagtcctcatctatagagccacataagtttggatgaaactatgaaccaaagtaaatcccccttccccttattttgtcctggtagtatgaaattaaccaccacgagcatactttagcctctcggtttttgattattgtgaccttgtaagcagtgtaaagtctcacccatggttccattctcctgatgttatgcctctgtaggcaggataaagttctaacccctgaagttagggtctgacatcaaggtcaatgttacccttgagatggagacctggtttgtgcttcttgctggataaatgcatggtcttgctttgtctctagcctcaggagtgtttttcctgttatcacatatgctcagtcatgttcatatgaatgtgtgtataagcctgagcacacaaactatgctattaaattttagataactagtaggcttgcatgatggctcttgcttgctgctaccactgctctctggtgttggtttggggtccagagcaaggatttgacgtgacagcctccccattctgctgtcttcctggctgttctaacaggagtgtcctttgcttttgttatggtaccctatctttagaatgccagcatgggttccaggtcccaatttcctcctgtcattttctcctgtactcctgctcatatgaagctctcttttggacatttctttactctacctgcttcctaggactacggcatcccagccccattcacagcctcattctacagctcttccactgcctgcctctgtccttgcttctgaacaggagtgcctcctctctccctccaccccggccctgctttctcctgatccatctcaattacacctttgcatcactcccaagtagaagttttatgtgcatctcttcacaccctggctactgataggggtgtaggggtgaaaaatttctacagagcagatcaagaataatgtgttatttatagaatatgcagaaaaacaactatgctgaaattaatatatatttaattaatatacatatatttaataatatatagaatgtgcttaatattttatttcacagtttaaagtacttttaggtatgtgattttcaggtttccaggaaacagaccacacaaggtctatttatattgctttaatccctttcagacttgatgagaatataaaatatgtatatatttgtacatgcagaatatcaggtgcatttatgtgttcacatgtatgtgtggtgcttttacaataagcacagagatacggagtcttatttaaaatttttatgtgttagaaacatgcaaattatggccttgaagctctctgaattggttctctctctctttcaatcaccagatgagcacagatttttttaaatcacttcagaagactccacataccctctcctatttacaagcccccctgtgcccccaaggtagccactttaatttaatacagcaggattagcaacaagcaactgattgccacacctttttctctgagctggttagttcaatctgttcattttttattggaggtactgaaacatttgtatttatttttcccttttattttgtgtcttgtattgacaatgccttctttttttctatttcttttaatcccttctcctgtttattaatcaagtttagactgaggtttcagttacagtgagatttccattatattgatgaaaagattctcatacatatttgacttaacaatgccttaaaatgaatcagaatatttattcttccctcaacccccccccccccccgcagggctttagagtgctttaatttcaacattttgcttgtattctttgatattatttatagcttctttagtttcactttattgaaaaagaaactctagatcatctaatgctatttttttttcttctgtaggtgtgctgtttctgttatctttgctcaagtctctgctggctgttgtctcaagctccctatccggctacttagttaccattttattcttgctcatatatactttttatctttctcataggaaacatccatgaacaggaaactgtcttatatttttgcatcaatgtaagtttgttttcctcaggtgtttaccagtggtgaatttgcactttctaccacccagttactttcccttgggtctaggccagttggaggagtgtctatctgtctgtctgtcggtctgcctgcctgcctgcctgcctgcctgtctgtctgtctatttttttgtttgtttatggagcaacgggccttttaagactcataacatatcaaaggtggataatcccatctctggttaaagtgtacctaaatcccgtggatcctgttcttgggggtaatcttaaaagcaaaacaaaacaaacaaacaaaagccctgccgaatggtggtaacacatacctttaatcccagcacttgggattaactctgtgagttcaagaacagcctggtctacaagagctagttccaggacagcctccaaagccacagagaaaccctgtctcaaaaaaaaaaaaaaaaaaaaaaaaaaaagaaaaagaaaaaagaaaagccctggctttagtgtgttagtgttagtgtgagggctcacatcatgtattttagctttgtaaatgatacagctctgcctccctgttctgacttggtgtatagctttgtggtttatgtgtggcagacgatgcataaacggcaacagtgctgagttcttcttgacagttttctggaagtttcctggcatgccatcactggcctctccatcctctttgctttattctcacctatagttcatctgaccagcctctgacagcattcgaatccatcatcctgagtataccaagtataaacctgcttatattatgttcacaggcatttgtgtaatatgtggtgtgttcattcatttctgtatctctggagcaaatctggaaggttctgtataatgtttgagataaagtggtggacaaaaagtacaaagtacctaattctctatagtttataccacagttatggggaacacaaaaacgaatgtatcctatttacaatgcattgtgtctcagtcactgatggctactaaaggaataagacaatcagggaaattggatagaggatgctgatagcggtgtgggggctattttataattaggcagtcaaggccatcttacagatggagaaatactggatggagacttagttggggggacaagcattatttggagggactaggcagggcaaactttgaggcagagggagccccagtgcattgaccttgtggcagcagctgggaagctaaaagatttggccttagagtcaggaagaatggcagaacagggagaatctaagtcaggattgaagaagttaatgccaggtgaaatgaagagtcctcctgcttcataaaggaaaaggtactttcacgagttatttgataatttagggtaagaacaagattcatctgaatcatcactcatgttagcaaagtacagacttgaaagatgaagatcactgctgtctttatttcatctgaactacttgatatttcaaaaatacgacaaaaaggatctcaagagaattgttcttgcagcatcttgggaagagcaacttgaatatatttattatagagcactcttattttataaggtgttgatacatggatatgtatataacatttctttcctcaacatgagaagctatttacttcatgcctggacaaccaatattcaattaattatctgtgtaatgtatctccttgcaacaattacaatgtgtggtattccattgtcttttgcaacaggagagcccattcctctggaatttaaagttgttctcttgtccacctccaactcttattgagattcgacagtgacaggctaagaatctcaggggtaagaatttttttttgctgctattaccgatttattgatggtgattattcatttctcacataatatgtctttgggcaaatataatggggtaacaagaaaaatgaacaaagtatctacaaggaagaattaaccatgttggtcaaatcaaccaaagacaatgtcatccatttctcatgtttgcttgtgtggttaattgagaagagctcattcttacttgggtatgttcaaggtcttgtctagctctgtggtttcctagaaatctttctagaaaatagcaaaccatgtctatttggctactttgaaatcatcctcacatccttgcaaaagagaaattaaataaaatttaattgattcttgaagaaaatgtctttagcaaattattagtagaaagtaagagttgggaggtagctgtgagttagtgagtgccaaagggatgggatttagttttgtctgatttggttcaattaaataatctgtggtatgatcccaacctaaatatggactcactctcagctaacttaaacagtagtttattcaacaagatatgattggtgaaggaaggcaaatgttaagacaatgcaaggcaataggtgagctgctgacaccctgagtgacagagactgtgaggaaagtcctctacacatagaagtttctggaagaattgagggaagatttaagcatggcttgatagaagggagttttgatagagggaaggaaggggagctgtaggtaggggggatagtttacaaagggccatatgtgggaatgaccaacatctgttcaggcaacaggagggaactgacttggttggagtagagagttagtggaattaacggaagatgaggctatcagagcaagtctggctggaattcagtgtgaagagagacttgaatcagattgagtgatttgcattttacatttttgttaaagaaggaaatatatgattggttttagtgaagatggtggactaagtacctccactagtgttctcctccataaaacccatgggaaaagtggcattattaaccactagaaaagctctggcagttaatcaaaagcatgcagtaacctaaagtcgagacaactggatggatctcagaacagtgttctttctggcgtgtggacctgccttgccccatttccctctcatcagcttttccataccatcactaaacagcaacctacaatcacaatgaaagcctgtcacctgactatgtcataggaaaacacatgtggctggagtcccttcaaagcctcactgctagagaacattatctatcctttgacatgtcttatgattgcctgggacacatccctttaactctgagcctgcctggggtggtaaaacagttaagccaaatgcttaaggaaaggagaggggatgagatttccataggcactttgcaaatctctgacatcatcttgggattcacaaagcccctggaagtacaggctgtgcatatttcaaatgctctgcacatggtcattaaagatctgagagggccatatgctttcacctttgtctgatcttgaggttctgtggaagcataaaatgagttgttatattcatttgaacatagatggtgtgctccaaagtactgtctgtcccttgaaatcagaacagttttttttctccctgtatttagaaactctgtccagtgttaggttataaacaaattcattgaacaaaaaggccagtgtctgaaacagaacaaataatagatctaagagaattagttcaccgaagccatcagacagttttcaaaaccagcaaaaatgaataccagagagagcattgactcagactgaacatttccacattatagaattaaagtgaagtcatgactgtagcaggctttcttttgtgccaccaccagctcccaaatcacaacacagagactgtttagttttaaatcctcagccttagcttagctcttattttgtttctctatttctacattttccttggggcttttttacctttctttctgtatatcatacttcctttctgtctctatgtctggctggcctggcttttgacccaaggcatgtccctctatttctccctagtctcccttttactctcctgagcctagatttctcctatttaatctctcaccctgccagccccacctacccctcctgtctagctattagccatttagctttttattagatcaaacaggtgtcttaggcaaggtgaaacgaatgcaacacgtttttacataattaaacaaaggcagcacaaaccaatgtaacacatctttacctagttaaaataatatcccacaacacatgactatatctcaatctctgataaaaataaataaaagcaatgaacagaaagtgtccttgatgaagcagactttgatttttttctccaatacagagtttctctgtggttttggaggctgtcctagaactagctcttgtagatcaggctggtcttgacctcacagagatctgcctgcctctgcctcccgagtgctgggattaaagtgcgccaccaccgccaggctcagactttgaaattattaaaaaagtacttttagtgatttaaaatttgttctaagatctaaaataaggtatgaataattaaagaagtgagaatgatgtcaccaaatagagagtggcaggaaagagaaacatttatgtattgtttgatgtttcttctcgtttgttttaaagggaagatttattttggttcatcgtctgagtgtgtagttcatcatgttggggaagaaatggaggcaagtagctccatggcagtgggagtatgcatctgggaatccttccacacatcccagtgaaacaggaagctgagacaggaagcaggggccaactatgaaccctgagggcctaacccagtaacccatgtcctccaatggggacctcaccttccaaaggctttacaaccaccaaaaccagtgacaagttgacgagcaagtgttcaaacacatgagcctgcaaagctcatttcacactcactcacattttgttcccgttccccaaagctgtatggacatcttataatgcaaaatgtgcttttggtccaacttcaaaattcaaacactattaaaaagttcaaagtctcttttaagactcttaattgtgggcccctgtaaaatgaacaaacaagttacatacctccagagagtaatagcccagaataaacatttatcatttcaaatgggagaaatgaagataacagactaaagaaatgaaagtttcccaagtgagctcacattattataccttggagtttttgatagataaagtctttcccttagtgcatttttactactcttccagtgcaaagtgtgaggtttgttcttactggtattaatcattttaataattgtagctgttctgtcagcaagtttcttacccacttatctgaaatataaacatattcatgctcctttcctggctaaactacagatttccacatatttctgctctgcttttgctttgagttcttactctaagcctcactaaaagcagatggcaaacatatatgctacagacttgttgccacaccattatgaaatttcctccaccaaagaatttagtccattacttctgaatttagcctcactcaaaatttgaggacaagggaagaacgcagacagatgctcttctagaacataacatgaatggctctaattctaataaagcacttgttcctttcttaagcctcattcacggggcttctgctatttacattttcatcagttttctagtctactgcacacctattggaatagcctgttaggctctgcctacagcattcaagggcttttgtatcatgaaactccaaaatctttatcccctttcctgtaagccaattaactacatggtattttggcttataaaccccctggttaattttattatggcaacaaccccactcttggtaccaattttctacattcactgctcttctgattgctgacctaccatgcaaacttaagggagaaggacttattttgaatcacattttgagggtatatcccatcatggctgggaaggcatggtagctctctggtcatgggaacatcccgctgaaaaccttactctgaaggttccagtggaacaggaataagaaactgctgtttttatggttctttggaatacctgccccctacacgagtgtgaataaacacccccccacacacacagaaagagagagagagagagagagagagagagagagagagagagagagaggttcaaaataactactgggattttaaagtacacttcagaaggcagaaaaaataatcagaaacttgaagatagatccactgagactactaggtaaaaatcatagaaaaaggatgaagggaactaggtagagcctgagagaacttttggataccattaactttatcaaaatacccatgaaaacagacccaggatgagaaacgtaataagatcagaaaaatatttaaagaaataatgacttgaaatttcccaaatttgatgaaaaacattaatctgaaaactcaataagcttggtgacattcatctggatgaactgaaaaaggtcttcatctagaaatggtataatcagcttgctgatagctagacaaggagacaaccttgccatcagtggagaagcaactcattatgtacaactgtgattcttattctcctcatcactgatttgggattagaggccccagaggtgggaggtggatggggctgaagcagtgggaagatattttaggggctcaaataaagactttcaaacaagagtcccatgtccactaaagctatcactttaaagtgaaagataataactggtgaatctctggtgagataactcagtaggtaaggtgcttgccccacacatctgttaatttgatgtcttgaatccacataaaggtaggaggagagaacagacccctgacatccatgcgccatcgtatcccccatcaagaacatagaaaatagtaataaatctttgtttataaaagattttatttatttattatgtatacagcattctgcttccatgtatatctgcatgccagaagagggcacaagatctcataacggatgattgtgaaccaccatgtggttactgggagttaaactcaggacctctggaagagcagtcggtgctcttaacctctgagccctgaagatagtaataaatcttaaaaaattaaaatttgtcagagtcctccaggctggcgtttgtcctgacctgcaggatgtcaacctcgggcaagagagtcagggatagggaatgggggacaagaaatgcagaaagaacgaccacaagacaggattctgatcaagtggcaaactttacttttctcaggctagcttatatagtcagcagagcaggatatggggaggggcagaatgggttgtttgtgtaccacgtgttagtataggcaggatattaggaagccacacagaggatgtttggcagggtaaagagtttatgagtaagaggtccaggaaggcttgcctaagtgactgagcctgtgggtggaggactgggtcaagttgtttcttttcttgagttgaggttctaaggagctccgatgtaaaggttaatatacaactatgtggctggccaagaatggcctaggatctcatgccaagccctgagatttggctcccaacagacattaagtgaattaggcaagaacttgaatccatatgagaaaacagacagcattagctgaagcaattgcacaggcagcttgaaaagattgtataagaacagtttttgtaactttgtcctgtatgacttaaaggaaaattcatatagagtaaaacttcatagagtaacaatggtatgtttctgtgttaatgggcacacagtaggtaaggtggaatttgtgtgaaaatatgctgccaggagtagacagagcaggacagaattgaagtctttttttttaatagtattaaaactaatttggcattaatccaaagtagattactgtgtaagtgaagatgataattgtttcttctgggaaagactaagaagtgaagatgtgattttgatttcattttgctatttcttctcacactttactagaaatgatacccagataattgtgtaagaagcaaataaaaagcatgactactggaaaagaagaatttggcttatatatgcagatcacatgatcttatttgtaatagattctaagaaatcagcaaaaaacccataaaaactaagaaggtcagcaagttttcaagatgcaaaatcaatatattaaaccgttgtatctttttacattagcaataagcaaccaaaaattataataaaccaattccatttacaatagcataaaaagagaaacaattaggaatacaatgcacaatgcaagtgcaacgctgggatccttaaagcagccgagcagggttgaagacactttgcaacaatctcaacgagtagaaagacaatgctcacagatgagctactcaacactgttgatgtaactgtgcccaagcaggttggcagaatgaatagaatccctttcagaacctcactgctgttttcctcccagtgactgacaagctgattttgatattcacatggaaatccaaggtgcctaaacagccgagacaatcttgaaaatgactataggattcatactaagtttcaaaatttgatgtgatatcctctgaagaaagccttaatgaaatccaattctttgaatgggaatacaatgttaaatcaatcaagaatgctgctggaataaaaaatgggtgtgccggttaatgaaattgagcagctagtaacaaacccttgtgttttaagtttttattttattggtaaaaatatttatgtatgtgcctatgtgtgagtacgtatacattcatgtgggtccctgtggaggacaggaaagggtattggatctcttggagctggggttcacagcatgacatgtgtgctggaaactgaacttgggtcctctgaaaaatcagtgtgtgtacataatggctgagccatcactccagctcccatgtttttagacaattgtttttgtccaaggatgtaagtacatcatcataggcaaaaataatcttgttgacattagatgctggcactgtgattgtccacatattgaagaatgcacctggatgtaaacttcctaccatatacaaaaattaattcagcaaaaatcaatgtcttaaatgtaagagctaaaactacagaaactctacctgtgtttaaatcaggttgatttaaacaagatttcgtagatttaaaatccaaggtaaattatcttggattagccaataatttctgtttagaaaagttttaaaaataatctttatgagtatgaatgtcttgtctgtgtgtgtgagcagcatgtatgtgcttcctatctagggaggtcagatctggtcttggatcccctggaaatggacttcaggacagttgtaaaccaccaggttggtgttggaactgaatctgaatcctttgctaagaacagcaagtgctcttaactgctgagccatctctcctgcctctataactttttaggtataacacaaagcagaagcaactgattaaaaatattcgacttaatagaaattaaattcatgcattataaaaatggtaaagtgaaaaggaaagctgtaagaggggagaaatagttacacatcatatttcttacatgatttgacattaggaagaccattctttgaatacataagacaagtgacccagttaaagatgcacaaaataatgaaaatgaacatttcttttaaaaagatacacaaataactagtaagcatatggagaaaaggtcaacaccaacaagcagtatgaaaattcaagtgatatccctagcataggtgtggactctaggagctcattccacatagagggttactccctgagccaagacacacaggcgagggcctaggccctatcccaaaggatatgatagactctgatgacatcctatggaaggcctcaccatccagggggagcagaaaggatatgtgataggtacagttttagttggtggggtggtaggggaggaagggagggagagggaactgggattgccatgtaaaacaatcttgtttctaattcaaatatgaaaatctgcaaaaaagaaaattcaagtgaaattatgataacttcctaccacgaatatgctatataatgcatatgatgggcaacacaagcatggatacgtggaaagagttttgctggtaaggatgtgaaatggttcatttgggggaaaagattggtagattcttaaaagtgaagttaccatgtcacccagtaattccacttcaagatgatattgaggaaaaattaaaacatatccacataaaagctgcacctgtagtgtaattactgaactacttaccctggaaaatgaatacagctgatatgtctatcaacagcttaatggctatacaaaatgtgctgtaaccatactatgaaatattcccagccttaaatgaatgaattacatgaccatgacaacccataggtagagcttgaaagcattctatgagatagaagcaggctagaaaagactacacagactgcaattccatttatgtgaaaagtgcagaatgtgaagatccatggagacagaatgggtggttgctaagcctggggaggaggcaatgagactgcctgctaatgagtatgtcactgctttcctgggtgagccacacactctggaattagacagtggtaatcatcggacaactttgtgaatatcaacagaaaccttgggattgtaaacttcataattgtaaatttcatggcatatgaaaaaatggcattttgggggtttttcactatggaagaaattgcatgttagaagtgttttttatgttcctaaaaacagctaagtgatgatcagtacattatatcaatgaagctagagtaaggaaatagctagaagatcattgcattctgcatgaagaacactggatcaagagtcctcactatttcagcagttgtttagaaagcaattatattcagaagcatctagtatttgtccgtgctggactacagatatggtccaaacattgttattgcggttcatacccaatggcccatattacctctgggagtgtgtatgtacacaccactttgtaaactgtagttcgttctctgtacaacagagattctataagcacaggggcaaattatacccatgtcagaatatgagtcttgaaatacctaatttatgcaagacacctttgataacccgcatacagtaacgaaagtcacaataaaacagtaaaggagacttgacatccaaagctttaggtctagtcgatgaacttgccattgagtctttttctcttttttctctttttaaaaaagatgccagaacctttgcattttccaagcacagctttgcctagctcactgtatatacatgtcagtgcatatactgtatgttgtatgttttataacatgggatgctataaacataatcacatacactttgactaatacatgtacactgtatacttacgtctcatatttatatgactacatgtgaacaagcacaggatgggaaagtaggacccacatcttacttaaatatgatgttcttttacctaatgttattcagagatgcccatgtttgaaatatgtttctgatttttttttgtgtgtgtatgtatgaaaatataaaaagcccttctaagaacaggaagccagtttaggaatgaaacttcctctcttgcttaaagggctgtgttttcctatgcaaatgtagcaaagcccagaaattagcaatgactgctaaattaacacacttgaagagcttggctggttctaataggcagtcaaatggtcttgttacattgtaatggtgccaagctaattgaagtgattactgttgctcatgagcagcctttttgaagtagaagtcttttaaattatccatagacgttaaatgtcagacactattgtgtaattatactttgtaaatgctgaatgtcataaggcatcacaggtaattgaggtttacagagaggagctttttctaaacctaattgggcatcaattctttgtcactttttctaaatctaattgggcatcaactttttgtgccaggggacactccaatgccttacagtctccctttctcccctcccctctccctgataggcctcctcatggggccctacatgccaagatgtttccaaaccactgggctaacaaacggctgtttgtctcaccgagtggcgtcttctgggactgtgatgccagtttgggatttcacagaccgaagctttctgaagcctgatgtggctatcatggcagaatgaggccagctgagtgaagcatccttctttggaatctcagtgtgtcctgggattttcactggtgtggggatggggcactgcatgggatttttgagatactagaagcagaggtttttcacaaacctaaaacagccctttgtttactactcctcctgtttcttgggttgtttgagagttcatatcttccctcccaatttaaaaacacattcatgcatgctatttttcactttgcttctgtgacaacaatgtgaagtctaaggcaaacttcagaagggttgcatgtcttacctatgtgagttctgttctgaccaaatggtccaactggacttaatagcgaatacaaccaaatgtctccatgtttaccatgagtcctttagcttgactggctggaaatatattaaagaacactgatttttatcagtggctggaaggaaatatatgagaaagtcttttgttgagcaattcttcatatatatgtctaattgatcaccagttttattaaccaaaacttctgttatctcactatgatctcatgactgcagcctcggtgtgtgcttctagcaggcaccactttgtgaaggtcctggcttgtcaggccctctttctctgtgtttttaaaaaagtattcatgattctctgtgataaattgaattgcaagtaaaatgttctttgacctggactgccagactctgggagaagcattggtattggcagaaaggaatagaaatactttcagtgccagaaaagaaagagaagagccagatgtttctgctgagtgcactggagagttttcctgatgtctgaagatacagagatgctcacacagatgctctgaatggtccagccttgtaatggatttcaaagaagaactcatattcattgattatacatctcattgtgatactgaaaagacaaattaaatgaggactttttaaaaatatattacaagcagtatacagatacttgtcagaagtaacactaagcagtaagtgtagttttctaagcatcactttggaaggttccttttgtgatgtgcctgtcagagaagaacaaggttcaaggatattattaaagttgttagaagtttaaagtaataatgtgcaaggtgctgcacaaaatgttgaattatacatggcttttgcacagtgagcacgtacaatccgtttctctttgcttcctccctgagcaaattatatcccttttataagattctcaccccagtgtcttagaagtctagctttcgttatcagttactgcctctgttgtccacatatagcatggaggtttaaagtagaggggtgtcgattcctctccatgtgggctcaatggttgagatattcaggggcggtggttttcagaattcactatttcaactttctaggacccctcctcaaatataagcaaaataggatgtgtggccctgtaaactgaggttttaaatggattctcagctggcccctggccattcagttgaagaccaaagaaacacatgaggaacatggtatccaatggcttattctgcatgctctgagggcaagatgagaattcttggggacagtgtgctgtgggcttcataggacatgcatcgatgctgcttattacttaattccagctctttgctctggcacaaggtgatcttgtatttccttatagttgaatttgcattatgcagttttatccagttagttgtgaataaagtgatgtgccattttcagattggagcatttattgatcaaactgcaacttcaatctcagtcacaataaatcaccccccccactttgtctcaccccacctcatgtggctgccacctcttcttctttctcctcttcctcccctccatcccacctctctcccacagctccctctggatgggatctcactctgtggtacaggatgacctcatacttgtgaaaatccttctgcctcagaatctggagtattagcattacaggcgtgagccttgacacttggtttaaaactggcatctccccagagcctttgttctgtttgtcattgtgactggcagtattgaagatgatgattactctgtctgctggagcagagacctgaatcagagccactgctgacctcagtgggtctgtaggatggtgaattggaatttgctatcattggcattttccttgctgaaaagtgtaatagcctacttgctaagccatagctagagcagtaactccctgaaccaatcattacatcattagggtctatgtcaagggttacaaatacaaatgccagtgcccaggaaaccatactgtatgaaaggagacagacaggcatgagaaaagacatgctgtgtttgcatataaagaataaacacacattctttacaaagacatatattttgggttttcatattttagggtgtcctctgatttctctcttttgtagtgacagccccagtagaaatgtctatacttgatatataacagaggtcaagcctgatgcccaatgactattgacacttgctctctatgtgttgagaacactgttggaaggacggtgactgagaaacttcagaccacacaaaccatatctaaatgagaccgctagcttttccctagcccaaggtgaccttgacctgcaggaatacatagctttcattttaccaggagaagcttgatggttagatttttatgtgaaatgtgttgaatttaaatattcttaggaacaacaaaacataccataaggctgatagtatatgactttgaccctagcctagtgcctcatagcctttgatcatcaagctgctgccaacaatgatagtttttgtttttttcctctttattaaagaggttacatcttaggaacaggataaacatcagctggcaatataatgagacagagttgaagcaaaacactagcaaatatctgttgatttttcattatatgttcaaaaccttgccagttgtaatgagagttactgagaaacatcaaagaagccctgacttgtagatctgatctagttgggcaaaattgacaaaaattacaatataatgtctaagaaacaaactgagaaacaatttcagtagaataaatattacatatttaaatgagacagtattacaataaagaaagaacttccttttccagtagttaggattctccaaaggaggaattgagatgtattgagatgtatggattgcatgtgtacacagcgcgtgcgtgtgtgtgtgtgtgtgtgtgtgtgtgtgtgtgtgtgtgtgtgtgtgtgtaaaataaggtggtggagactaggaggttctgtgatctgctgtccacaggcaagctagtgatgcagctaaatgctacagagtggagagtgtgaactcgaagccccaagggttggagagaatttcagtttacctcgtgggacagagagtgaattcaaccattctcccccttttcttctactcaggtactcagtagactagatgatgcccacttatagctcaaaggtgtcttagggatcaaaaggaagttgtggaggaaagggttttatttggcttttgctttcacatcactgttcatcaccaaagaaagtcaggataggaacccacgtggggcaggagctgatggaggccatggagaagggagtgctgcttactggcttactcctcatggcttgcttagtctgctttcttatagaacccaggatcaccagcccaggggtgaccccacctacaatgggcttgtcagcccccgctcccatcagtcactaattaagaaaatgccctagaggcttgcatactgctcgacctcatggagacactttctcagttgggtctccctcctctccagtgactctagcttgtgtcaagtgaacataaaattatgtccagcacagaagggtccctgctttactttgatccaaatgtgaatatcttctgattagacccgcagagataatctgagaaataatgtttcctcagcttcctgggtggcccatggcctagttaaacctactatccttgaaatgattcagggatgtctaatttatggccaacctgtgcactaagtgctatagtgtgagcagaggcaggaaggagaaagtgagggtggcacagctttgtgagggtgtgagaaagggaatgacacagaaagttgaaaattgagaggtaactgatagtgtagaaacgaaactcccattgaaggtgacaaaatgccaggcagagcaatgagggggtctggctgccagctgtttgttaagaggaaacttggatgtcagcatccactgcatagatgtcatcaccaagttttatctatgctaggatgaagtgcatcaatgttggattcacttgtcaagcttattgaaaatcaagttgctcaaggatgccacacccgagccttccgaagatgggatctgagtgagctgtgcagtggattccgacacaggctatgatggaagagggagatctggtatacctcacggaagaacaagctgaacccagagtgaggctgagccttgggggaagaatccaggccgatttacaatgcctctaccaacccccaggcagatggatcgcaaacaacaggtttgaagctaggcctgtggaggtagagatggcagtgggcacagggaaggatgggagagggaaggagtatctcaccagttaaaggtggctctccaaggaagcaggttcagaagccattgatgctggcgctaggcctgtgtggtatggggaggctccaggaatggggtgggggtggcgttggagtcaggagggaagacaggcggaggggaagaagtgatttacccatcagaacttgatccatagcaaagagagttcatgggcagagatctggaactaggcttgtggatttgcagacaatggagggaaggcaaaccattatttggagattaactgtattccagttttaggcctaatgtctacattgattcctcatttgccttttctccttttcctcttccctcatcttagaagcatcctttgatggcacatcttccaacatgttgccagagaaacatttcaacctcacttgcttgatgaaattccatgaacaaccacaaaaatacaaagaatcaagattacctttgatagctgagcaatgcttaactaacgaaatgaaaagctttgcccaaggcacagcattcagatccattgtgtgagccagttgtcagaactgtctaaggcagcatttacgtttgtcagaagcagaaataaggtaaaacacatgggagaagtttctggaatggagaaattagtgggaaattaggatgcaaacagcatgtcctgaggatcgaaaacaatttaggcaaatgaagcaatcggtaaatattgtttgctacattgataaataggatttggcagccatccaaagtttgcttttagtttgaagccaaaagtagctttttatttgacaaggtaattttatgtgttgatacagagtgaatatttgtgcccctcagtttatgtgttgaaacctgatctcccaaataatgacattagaaggtggggccttcagaaattgattaggtcattaggagaagcttttatgaatgggaattagggaccttcttaggggtccaagaattttcctgcttcttcatgtgaatatggagctagatacttccatccgtacaccagacaggagctctttcttggactttctgtgtctagaactgagtgccatctagaactatctattcacataaagatgctgttgaagctaaaattgccagggctggcttagcagatatgtgttttaaaatgggcaggtattggtgatgttgaaggaaagacatttgaggaatgtcacagactgtatgtgatcctgtgggaatcggtttctgattttttttttttttctgacagaaggatgtgatcagagtgacacacagaaggttggagagttttcttttatgagcactgctttcctgatgttgttcttctgttacccgtgacgtcatgttaaaggcacaggagggagaatgcggctccatcactgaaaactggactccttcacgttttaaaatgtgttcgctaagacctactgtgtgcgaggcaaagttctgtgtgtcctaggagaaagaggaaaatgctaagaaatgatttttcctctcaggaaatttgtgtttcattcttttgggttacatttctagctagccatgtgtgtgggttaatttttaaactccaagattaaggaatacattgaataagtaggaggatgaatgttggcattacaggcttgggtacaagagatgtgaaatgaacaataatgcccttcaggtgccttactattttctagaaaaaaatatatatcttgttgggtctgttgacctaacaggaggctagcatttaaattctgggaagggcaaactatccttttgcctttgagaagaccaggttatattatcccctacttttgagccaggtgctgagatgatagaaagctgttaattagggacaaaattctgacttaaggaagactgccttttgtttttttcaataccgctttttaattttaattttttgagagtttcatacatgaatattgtatttacatcactaatcctccctcttcccctccaactcactcatgtccccccattccctctcaaattcattatctcttctttctttcctttttaaaatttaaattagaaacatgcttatttttttattttttcaacttttttttatttgaattagaaacaggatttttttacatgacaatcccagttcccttcttccacccgtcctccccaaccccccaactaaaaccttatctgtcacatatcttttctgctccccctggatggtgaggccttccatagggtgtcatcagcgtctattgtatcctttgggataggacctaggcccacccctatgtgtcttggctcagggagtattcctctatatggaatgggctcccaaagtccacacctatgctagggataaattctgggcttctacaggagggctcatggatttctgaggtttcctcacagaaacctatgttcctgaggtctggatcagtcccatgctggtattccagctatcagacttggggagcaagagttcccagatgttcaggtcagctgtttctgtgggtttcaccagcctggtctggacctctgtgctcttcactggttcttctctgcatctgggttccagttcagttcggtgattagttatgggtgtctgcttctacttcgactagctggtggatgaaggctataggatcagatataagtcagtcatcaatctcataatcaggggagggcatttaaggtagcctctcctccgttgctgagatagttagctggtgtcatctttgtagatctccagacatttccctagtgcccgatttctctgtaaaacaaaaatgtctccctctattatgatatctccattcttgttatcgtgtattcttcccctgactcaaactttctgctccctcatgtcctcggcatccctcttcttctccccttctcattctcctagctccctcccccctcttcccgtgctcccaatttgctcagcagatcttgaacctctccccttctccaggggaccatgtatgtctctcttagggacttccttgtttattagcttctttggcagtgtgaattgtaggctggtaatccttattctatgtctaaaatccacatatgagtgagtacatactatgtttgtctttttgcgattgggttacctcgctcagaatggtttcttctagatccatccattttcctgcaaatttcaagattccattgtttttttccgctgagtagtaccccattgtgtaaatgtaccacattttctctatccattcttcagttgaggggcatctgggctgcttccctctccctcccattctcccatgtcccccaccaacccccatcccatccctcttctgcttcatagaaagggtgaggccttctatggggatcatcaaagtatgtcacattatttggggcagggcctaggctctcccccgtgtgtctaggctgagagagtatccctctatggggaatgggctcccaatatccctacatacactaggtataaatgctgttccattaccaggggccccatagactgcccaggcctcctaactgacaccaacgtgtagggtgtctggttctgtcctatgctggtttcccagatgtcagtctggggtccatgagttctcccttattcaggtcagctctttctgtgggtttccccagcatggtcttgacttctttgctcatcactcctccttctctacaagtgtattccagaatttgtctccatgcttagccgtgggtctctgcttctgtttccatcagctactggatgaaggctttaggatggcatttaaggtagttatcagtctcaatataggggaagggcatttaaggtagcctctccactattgcttagatttttagttggggtcattttaggatatctctggacatttcctgagtgccagatttttctttaaacctataatggctccctctattaaggtatcttttttctttgctctcctctattcttcccctgatttggtcttcctggtccctcatgtcttcctcccccagaagactgccttttattattttaaacagcaatggtaatagcagtggcagctaatattaatctagatataatttttcagactttaaacattcagatttatttatttatttatttatttatttatctatctatctatttattaagacagcatttcatatagaccttgctggcctcaaacttgttatgcagctaaggattacattgacctgattctgccttaacctctgagtactgaaatctatagctggtttaggcagtgcaggggtttacatcctggtccaggacatgctagacaaatattctaccaactgagctacatccctagccaccaacctcttttgatccacaggatcaggccataaagatgttgctatgatcatgctttcccaaaagagacaactgaggcataaagatgttgaaaatgtgctcacagttacacagctaagcatgtggcagagcttcaccactaggtgaagcagggccatgtgacctcagaatctatatcctggtgacagctacctccatatccattcctacctgaagtgataaacagatttcacagttgtacttcaactacagtcattcttttcttcctgacgtgtgatcaaatagagaaagccatacatgcataacttaaacaagcaaacaacaatataacaacaaaacaaaaaaccaggcaacctattacagtgtaccagtaattgaggatttggggaattggaccagggaatgatcacaaactcaagtatttctctagagaaaaaagaaaggttatagcccccatttatctggtgtttgccacttccaggtaattttccttattatttttggcactttccatcattcaagatttaatgagtaattaagattatagtaattaatgccaatagaatatagaaatgatgcaaaacacggtccacatttaaaatgaaattttaaagtaggaatgaatctatgatgcgttgactagaggaaagagttgctattggatacaaatatggattatatcaattaaaaggtcccatttatttaccaggaaactgaataagctcccctaacatcagacaagaatcatgtagcgtatctgacaactgctggaggggatactgacacatgcttttcctgatatattctaaatgtattcattaattacatttagaagtatacaattataaatgtatgctctaaggatacagaaagactggcaaaaatgttgaaacttctcataagctcagcaaaatgggcatgttaatagttgtttccagtttcattgttcaatgttatgtgtttaattaaaaaaacaacttgctaaacactgaactcttgaaatgctaattcaactaatatttattgaacacccactgtgtgctcagttagggttgtcagagaaatataactagtatatgactatcaaaggacttcttgtctttgaaatcttaagctcttatatttgtgttgtatagagaggtagaatcagtgggatataaatatagatgtaaatagctacatgagtcaggattattagagaattgacacatgtgattatgaaagcaaataaactctaacgtggaccttctaaaaactggagacctaagaggctggtagcactggttaaaaaatctgagacccttgggccagtgctgcagctattggtccaaggaaaaagggaatgaatgctggtgtaagtcctggagttcaaattttacagaactttgattttttacgtcaaaggacagaagagtacattttatgtctaagacagggggtgggggaggagtggggtggggggtggggaggaggagttgcttttcttttgccttttatattttatccaggctttcagccaattcagtggtgcccttcacatgaaaagtgagtcttactcattctatatacctccatgttgtttctttctggacacactcagacatccactaggaaataacaccatattaattctccagtgtgctgatgatgtctttgtcaatttgacacaaactagagtcacttggggggagggaacctcagttgagatatcacctccatcatgttatcttttctgtggggtgttttttaaaattcatgattgatgtagaagagttcagtccactgtgggtggcgttaccatggacagagagtcctaggttgtataagaaggcaagatgagcaagccattagagagtaagccagtaagcagcttttctccacagttctgcttcaattcctgtatccaggttcttgtcttgaggtcctgccctggtttccttccatgatggaggcttaaaaatgaaatcccagaggagggagagggaactgagattgacatgtaaaagaagcttgtttctaatttaaataaaaaaagaaaaaattaaataatcattttactctctaagttgctttaatttagtgttgtatcacagtagaagaaagccaaactagaaaagaaattggtaccagagagtgggtgtttctgtgatggaccagacaatgagatttttatttgtctttttgtggatataagtgttatagctctgaggggggaaatgtcctcagagtgttacagctctgttgggggagcgtagtgtttccttactgtgttatagctatgcttctgtggtgtggtggtggtggtgggtggttggtggtgtttctctagtgcaagtgttatagctctgttgggggagtgtagtgtttccctactgtgttatagctatgcttctgtggtgtggtggcgagggggggcggttggtggtgtttctctagtgcaagtgttacagcttttgtagggtaaaagtgtcatggaaaaatactgtgaccttgacttgaccccaagaccaggtccaagggaagaataccttgaccttgactttaacttgaccccagcccaagtccagggccaaagacttgaaattccaccaattcctgaacttgcttccgagtcaggctacagaattccaccaatttctgagcacaaaaatcccaccaatccctgagcttgccctagaattaggccacaaaaccccaccaaccccaagccaccctggaaagctccactccccacacctaccacaaacccctatataagccctatattctgttcagtttgctactgcttttccccatagcggaggcagccatcctcctgtttccctcaaataaatctcgtgggtgaggtttgttgtgcactgtgacaccagagctgagttccagctgtaacaactttctgcctgagcctgagcagagtagaactttaacactttcactggggaaacttcccctagtagagcagagttgctacagtttgggggacctgaacagagttgtaacactttcactggggaacaccttccccctccctccctgcaaccagagcacacttgttatacttgcatcgaggaaaccatctcccagagcagaactgtaacatttctatgggagaagaacactgcttacagtgaatttgtggtattccttggctcctgactaccaggatacctttccctctgagctacaatgcttatagtttgcactatggtaggaaggtttctccaatgcaaacatctctgaaaggaaaggtatcctggcagttgggagccaaggaataccacaaagtcacaccatacaacaaacctcacacaagagatggtactacctttctctatctctatttggatttcccacctggctaaaacctgcctgttcattggtctgaacagcttttttcattaaccaataagagaaacatatattcacagcatacagaagaacatccaccatcacccctggagtccagaaggttatgagtgagtctcagatgccactgtactctttacattgttggattttggttttgctttgatctgactacaaatgagcccaggtttttcacttttgaaataaaagtatgtaatttaattttgattttataagatcccataggtaagagacttctttcttaaaagacattgaacatttttgagagacatggtcactctgtttaatatctctaactgtcctggaactcattatgtagaccaggctgcccttgaattcacagatatcagcctgtctctgcctcctaagtgctgggattaaaggcttacaccaccatatctagtaagacattgaattttttttttttttttgaagacagggttactccgtgtagctttggagcctatcctggcacttgctctggagaccaggctggcctcgaactcacagagatccacctgcctctgcctcccaagtgctgggattaaaggcatgcaccaccaacgcccggctgacattgaacttttaattggtggatttttaaaaaaaaaaatcgtgggacttttgaaagttaaactgtgtttcatattgtgatattaatcctctcccacaagattttcagaacaaacaaagaaaatggtaaagttttacagtgatgtatttgtatgttgagttgacaaggtgttagttatgatggttagtctttgtcagtttaactcaaactagagtcacttgggataaggagcctcagttgaaaagaatatatctaccaaattggcttgtgggcatatctgcaggcattttctaaatgtttcatgtgcatagggctcagtcttctatgggtggtactacacctgggcaggtcttggagagaaagccagtaaacagctttcctccatggtctctgttacaattcttgggtccaagttcttgagctcacgttcttgcctttccttattgatgaattgtgacctgggtgttgtaagatgaaataaacccctatccaaattgttttgggtcatagtgtttgtcacagcaagacaaaaccaaactgggacatccagatattccttaattctgtcaagttcacacctaaaattgacaattgcagttctgaaaagtggcaggtgactctagtaaatttgggacaatcaaattattcccataggatagcattttaaagtgtgcaagggtcttttacattgattgcttattttggttattttaattccccaatgaactagaaaaagtgaagcaaccaaatgatggcccagtccacacagaagctctgagcttctgacatctaggtcatggcaggatccctttcttctcagtttcttctggtgtaggtgcatggatcctgggatacattgtgaacagtgtaggatgttatttacatctggtatcacaaactgtgttagcaagattttgctgggtgtggttgaggttatgattcagggggcctactttgaagattatgtaagaaacattgccaggttggcttctactttgttgaagatattcatttgagctgagttgtgtctgtataaaattcatttattgaagtgctaagcccaattccttagattataactatttgggaatgggattctcacgattccttagattataactatttgggaatgggattctcacagtgtaaattaaaatcaggtcattattgtagaatgtacccttttccaatatgacatactacttcttctaggcaagtggcaaagtcaaagccaaattggaaaatcacacagcctatctacttttgggtcatttgtgattttccagttttttaaaaagaagacacttttctatacaaaaaagaaagaaagaaagacctttattccctgcactgtacacaggaggcagaagcaggaggatctctgtaagtctgaaacagctgggtccacatagtgagttccagggcagccagagctatataatgagaccctgtcttgaaagagaaagagagagagagagagagagagagagagagagagagagagagagagagagagagaggagaagagcagtcagttcacctgagtgtctcgattctgaataaattgaggcttgaggtattaaggcagctttccacgcattcccagaattcctcatggaaaaggcctggaccagcagctccaacctcatcaatagtcttctatcactgaacctcagtcaggaggctgatgtagtagaatgtttcaaacacagtggctcaacaagtcattgaacagcttctctaggaagaaagcaaataagtgaaatgcagtaagggttagtctatcttctagacacatgaacaaagcctctggggtttagtaggcagctggtcagccttccattcagctgcagccagtcttagggttctaggaagtaaactgtcactcctgggggagggtgtcagtgtgctgtgccctgtcaagtcttgagatgctccaatctgcatccttgatttatcctttctgtttcctcacttatcaaatatttattgtcaacaacgggcagttctgtttgcacacagtgtgatggggtaatgagatagttaggtttcctcctgttattgatggggagtgctgatggcatgaataatttcctctctttataaatgggaatttaattattgatgccttgtttaggcagtgacaaaggtgttatcaacaaatactgcggttggaggtcttgggaggcatgaggttgccaggtcaaagtctggtgtccatgagggccatgaaatgaactttctcagttgcttagtatagagaatgaatgtctttatttcatttcatttcatccatataatttatatgtgttcccctagagacatcccgacatttatatgtgtgtctatacatatgttgtgtgcagaaattataaaacatatcaagtaaaacataactctcaaaccaaatcctaactctatgcaagcaaacccaagcatcaagaaagtactcttttcctatgttcacagcacactaattaaattctcagcactgacagaggaaagtttattcatacaacagataattttgtagcctggaaactcactttagctgttaagctataacccaggacttaaatttctgactttcttaccttgatttgaggctgtcagtgctaagtgtaaaaaacttctggtcatgggctgggattagtaggctaacactcattggactggatagaggcaagagggagagagggagagaggggagtgagagagagagacagagagaggggagtgagagagacagacagagagaggggagtgagagagagagacagagagagacacagagagagacagagagagacacacagagacagagagagagacagagagacatgaagttctgttgggagggtagggtggcgggggaaagtctggaaggagttggggaggggtgagtatggtcaaaatatcatttgaaattcttaaagaatgaatagaaacattttttaaaagaaattaaaaacaactactcctcctgatcaagagacctaacattccagctgggtagatgttcacttggccaaaggaccaaccaaccttaggacattgggctcaccttaagcatgctaaagagaaaagtgaaattagtcctttattgaggtacttactgtcttttcctttcctagaatcccagcctagttctgtcgcttagctgggactgttgccatgctacccatttttctgaattgttcagcaaagcagaacttctcctgttcttctttgtctcttttctaaacatgtattccttctcatgttaagtttccccaacattttgggttttctttctgtctacaagactccttctcattgtgtggctgctggtctggcaaatgtctgacctccaagccagcttaaatggtatggcctttgttctttctctcctccgtgctcttcctctgggcggctgctaatgtttacagcttgtctgccctgggaatttttttttaaattcttttaaacactaataacattgtctttgagcttccatttcagtcccttcttaaattcttctattaatgcatctaagaaccctgaaggggatcctggtttcccttgtgtcatctggatactgtccttgcatgcccactcccaccctattccaaaagaaaagtaaaacctaagagcagtatggatttcttcaggaggtttcctttaatgccttagttgttaaaagccagctaatgagataatctcattcttcctagcttcttggagtgagctggccaggatttggagtttatgtctctttctggtatgtaagccatgtgacatgggcctgtggggaagaagcagttgctgggattcggttgaagacagaaacactgtggacagggcttctcagactgggcatgggaaaggcctggggagctctcattgtaagggggagcatttggctttaacagtcaagctggagcctattttttcaacaaattcccgggtgaagtgggctctgctggtccatgcattgcactctgagtggtgtgaattagtagaccaggcagccaatccagacagcaagggctaagacaggtaaacagcagctgtgcttttgtaattttttttgattctttgtcctttgtagctgttactgggatgaatgtcattttttttttcaacttgcatcaaatagattttagctataagattttcatttttttttcctcccgaattctctgatgattcttgataagaaataaaagtaagtcaggctggtttaggaatgttttctttgcctctgatactttgatgattggaagctactctaggaagctacacttcctagagtagcttccatggactacagcctcatggactacaccaagcctgtgttacaggcatggttgacgagcacctgttacctttcctgttcaaaggttccatctgtggccccttactttcagatgttctggaaattgtcaatgtctatttcccagagaagaccctgtgagtgttctctgtgactgaggcagaatcataactgaagataaatggtaaataaaccacacccattccaatcaccctcctttacctcagcctgacaccagtgcatgctcagagaacaaaagatgctcccggagcctcctggcagagtccttgtttgaaactctgacccccataggcaagcaagcctgcttggtaagggccctgcttcctcccacctcccagctcctgctggcagtctgatacctgcttaaaagttcataaggactagaggtaaaagatcttcttgatcaagtgctgaatgatggggagagagagagagagagggagagagagggagagagagaggtgagaaagggaggaagaaagctcaggccaattatttttctacaaaatactgtatgtgacaacagcagcagcccccaaagggcagcatgtaacaacagagcctaattagaatgatttcggtgtaatcattaacttgcatctaacacctacgagaggatttctgtttaaactaaaacatgacctgcatggtggagaggccttgtaaactgtctctgaaataaaatatgtgacaggaaaggtcagagctgctctcatttgaatttcaagtagggagctggctccaaggtggccggtgcagcaagtccgaggactcgggttcccaggccttgctgccagaagaagcagttggaaaaaaaattcctccaggactaattaataggattgcaaaatgagaatttctcatctgtctctgctcactttccctttccttctcccagcccgggcaggaagcaaggctctgaaacggtgtctggggaaggaggtgatttcctgtgttgttgctatgagacagaaggtcaccacagaggggtctgagccagacacctgcctgctggtcccttggccaggccaagacggctctggccttcctagcacgtcttcctgccagccaagcagggaggcctggctaataaactctcttcccagcaagaatgatgccaaggcgctgctttccgctgggctgcgtaaaagcagctatcaaatcagcaagatgcagcttgatttgcaggtctccagtgaaatttaggaaggcggactgtaaaacgttcagggagaaagaagcatgaaaacatttttagggaaagcatttaaaaagtcagagacagacataataataaaaaaaagttggcagggacgcttttatttattcattttgaaacattgcaaggagcgctgttagcagtatttatctgcttccttttctttcttcttcttcttcttcttttttttttttcaggcagatctaaagctagggagctgaattcgtttccgtcttcctcctgtgactttttaaagctttgtatatgtggagattttttttttcacgtctgtgaatttctacagctataacattcagtgcataaagcctgtcttgggtaaccccatttcattcctctacttcctttcccatcccttccttccttctcattggccagcaatgtagggccatcctttgtcatgcatactgattgtctggttagtaacactttatttgtgttttgttttcaaaatcttttctttatttcaaacaaccagcttggatgagacttaaagaatgtactaggcaacagtgaaaggaaagagactcagcaaagccctccaacaccaggggagggagatgtccttccttgttaccttcagcacagcatgagtccgtggggtcacctcagagcatgggtgacagttgttaacggggagacccagcttctccaggctgcctcagtggggaggttgtcagctgtgagttatgagtgcatcaggtagcctgggtttgtccccagagtggtcagtaaagagatgatgccacctcagggggattctggttaaggcaactcatgagaattcttggtaaagcaggcccaggtaggaccttcgtaaagagacctccagtagcctaacagtgcggttaagaagggtgggctcagatggaggttgttacacgaacacacagcaattgtggctacctataaaaaacttacatgggtgtgcaaatgcatgagagtggggagggcactagatgggtcagcaggagtgcagggaagggtaaagggggcaaatatgatcccaaaacatcatatacatgtatgatgtggtcataaagaaatgaggtctctttgttggcgttttgttttctactttctctatccttcctagctcccagctcaggccagccctgaatgagaaagctcactccctggtccttcataccacccaggatactccctgtagcaagcaagcaatatccagatgctgatctaagtctgtctttaaacttttcctgtttgatccatagtctctcagtcctggagtctatttgcctagcaagactccctcttgggctatcaatcaagacaaatagcagatctccttgtcagcttcactgggcatgtggaaggtccatacatccctgctagagcctgtttggggaagatgaacagaagctctgctgctttaagaagttatttaggggctggggagatgggcagaaaatccagtttatccatgaggtctatgtcgagtgagagactgtgtctcaaaaaaaaaaaaaaataaggtggagaagcaattgagaaggaaacccagcattgctcctcggcctccatgtgtgtatgcatcacccgcatatgtataccaacacacagacatgcacatgcattcatgcacacgcgcatacacacaggggcacacatatacatgcccacacatgcacaggcacagcaagagggaaatctggaacattcccagcctttggatgcagcaattctctctgctgctgggggcttctctgcactccctgtatgtgcactgtcaagtacattccctggcacactggggagtgccctgacaggtccatccctacaggaatgggctgctaaatgactgcaacctcagtacttagttcttcagtaagctttcagtttatagcttgtgaggggtgggggagccctgggagaagggccttcccatcctcggcctgcctgcagttctctttgtgatggatgatagtttggggtgtcatatctgctgtgatggttcacagaggagtgcgaaaattcataaggaaacattaagttgtgtttaatgggattctgtctctgtgagtgagtaagtatgtgtgtgtgtgtgtgtgtgtgtgtgtgtgtgtgtgtgagagagagagagagagagagagagagagagagagagagagaaacagagacagagagagacagagaggatgttatctcagtgatttcatagagctacgccactttgacagtctagtgttttctgtctgctgcatggttcatgcacaaggaagacaggtgcttgttccccaatgcatgcatgggtcactattaggccttctctctgcctttgactttttgtctctcaccttcttggtatagcttcagctgcttgagggagtatctgtgtatgttttgcttgagcactctttcttcatattattacagccttcgccacatctgagagctcttggattcccaagatactgcatacaacctccttgagtgtagctttagcttctgaactttcaagaataagcaagagagtgagggcaaagaccaataagattagagtttgtctcatctaaaagaacaaattatcagtgggttatggaaatatggcaagtttgtttttttttaattttctctaagttgaatgatggcaaattcttaaaagaagcactcatactgttctacatggtatagcaatattgtacttgcctgagcatatcttggcagctcatcctcttttgcatcgtggtgtggtgggaaaaagccacagtataagaagctgtaacattcaccccgggactgcatcagtccctcctgtcattatggtggaaacacccatcctgtcccaagaaaaactgaacatattggacaggaagccagctaccctgccacagaaaggttcggtggctgcagctaatggggggatgttgtccctgttgtgatgctgacatccatgtggttctgggcttgtatgtgtgagctgctggtccttctagtcagacctgtggaaagtacaatgctctggcctagaagggcttgttactacttgttggaacatgattccccatttcatagttatcttgaggaagctgcttacttctttgtcttagatgcatctggtcttgtcagtgcctgcaagagtactctcagcatcttcaagcaattgcatgggctggcttctaggaccagctcccctgagtttcctactggccaaacaggcatgagttaaagggtctggctaacaggtgggcacttggcagaacttccaacagggcttatctctgccctaggagaggactgttcaggtgttcgctcctctttcggctgccattggcacaacataaagaaaggagaaagggctatctccttgccaacctttcatttgtatttagaactttcaaaataagatctcagcatttcctgaggtgcttggtgcccactggtctctgaaggggctcctgccaggaagacgtggttgctttgtgaggtaggagaaggcaaatctttgagctgctgatttaacttccttgtctcaggctccttgactccaggcagggttctgtgtaggaagcaaaggtggaaagaggcctccttggcttaagcagaacaccaagttggctgtttcttgttagatggtgggagcacactggcgagctgatgctgatgacagttcaccagaaccttctgaagagtttgatggaaagaaagtggggggagaagagcttgagagagttgtgtgctattgttaaatgagttctcaggttattatggacctatagctacctttcactgattgtaggtcagtgagggttaacggtgatcaggaggctgtgctgactagtttgtcaacttgacacaagctagtgtcattggaaaggagagagcctccattgagaaaatgcttctataagtttgggttaaaggcaagcctgtatggcatttttaaaattagtaattgataggggagagtccagcctattgctggtgggtccacccctggcctggtgatcctaggtgctaaaagaaagaaggttgagcaagccagagggagcaagccagtaggcagcattcttccatggcctctacatcagctcctgcctccaggttcctgccaagcttcagtgtctgtcctgacatcctttgatgatgaactatgatgtggaagagtaaactaaataaaccctttccttctgaagttgctttggcaacagcaatagtaaccctgatgtagaggccatagaagagtgctgcctactggcttgctccctctggcttgctcagcctgttttcttatagcccatgggtgctgttcactgaacacactcgcttacagatgaattagacatgcactgccttgagatgttgcaggacttctgaaaagcaagtttgcttattcctacttgatatatgaggaagcagttggtccactgccaagcttccacagcacccacacaagacaaacgaacacccaaggcccatctatgctctgatggcctcagcatggagctatgctaggttgtaggtaaaggaagagtacagatggattaagtttgccaataagttcatctaaagaaagatcatcttgggttatgattgggtcctctatacttaggaggatccttaaaagcaaagacaggaggcagaaggatggcagttgacaaagtaacgtgctataagaaggacttaacttgttgtctgcttcaggcagcaaataggcccttgagttaaggaatgtgtgtggctcaagtagtaggaactggcaaggaaactatgtcctccttagagccaccagagtgcatagtagctagtgtcccgattttacttcagagagtcccatgtctggtttgtgacctatacactgtaaggcaacacatgtgtgttgccacaaggtactaacttgtgctgatttgctatagcaatggggaactaatggagtctctatggggctaaagacagaacccaaagtcttctttcctaacttttgttaagttgctaaatacataaaaatgccaccagaaaaagcctactcagtctccatggcggggccgccttctgctcttttctgcttttccgatatgctcagttcacatgcttcttctctccctctgccttgccttaaattaacagatccttgctgtaaaagaaattgattcttcactctaaagtaggtcattataacatgggttttaaatcatttggtgtcccccacttgtgaaatacagacttcactttgatcttctgtgcatttaccagcattaaaaaaggcgagtctccccctcctcccccactatcagtcacctggacacatgcatgcatttcttaccctctgagtcatacctggaaggcagcaggagagatgttccctatccacacaggcagcaggtctcccctctgcatctacacccaggagaccaaagtcagaaacacaacaagacagggttccaaaagccaccaactcttcttttcccaccatttctccttctcagaactctttatatttaagtaatttctttaattttctaaaacttttcaattttcaaaaagcccatgctaagcttgtttcgttggtaaaatgttggcatagtccaaatttgtattgtgttctcagctttgcccctatatgttgattggatccctgattccacttcagaagatcacccccccatgcatggtggacctgttctaatgttgaactcatgataagtgggccaccataaagggaacaaggcattatggttaattctaaatcctcagagtctagtgggtggacaagagccttttgcaatggttgtttaatactgtacctattcttctctatcgtcttctcatactctttgggtgtagggaccaaatgtcttctgtgaattccttgcttctagcacaaggtgtctaatacacgacttcatacactctttggaatctggtacacctggcttcaagtcctagttctgttacatgcttttttttgcatgccctttgtctagttatttttgatccatctttggttcatttatacattgagttgcaaaaatctacagtgctgtgagaaatgaacagtacaataaatacacttaaatcatacagcacaatcttattattgcctatagtaggtacacaattaggaaacatagtgggacatggcattgcacacatcaactcacagcagctgtggtcacctgaacacgacccatacaagataaagccagtcaaaaacccattatggatgggagaggaactcggaattttcatgaatatattgagttactatgttcagatgtgtccagatagagaactagtctggatggaatgctgtttataagcagcaataaattacctcacttcatactattccccataactcttctctctctctccctctccctctccccctctccctctccctctcttgtatttggaagccaccttacttttggaaacaggatctatcactgaacatagacctctctgactacccagtccctggaatatctctgttttcagagtgctgagactataggtgaaggctgccatacctggcttcctttgtgggtgtttgggattgaactcagagtctcctatttctgcagcaggcactttacccacccagtcatatcccagcccttcctccttccatctcactgtactgccttagctctccttttctgatgctataataatgcacagaagggaaaagttagtggacctaagggctacttgagaacatttccatgtgtttaaaaatgtaacttacatgagcaaagacccaaagccaattctttatccttatattttcttgaggtccgaagggaagcaaactgtaatctggaaaagccatatccagagctaacgcgagtaagacttcctaaagcaggagaagcagttccaatcctgctggatgaaacccagcatttgtaacaaatgtaactgctgtggctttgcatgttaaacaacaacatctttgtttgataaaccacacatacatatgcttagctttctaagcagcagcattgcaatatggtgacagaaattacagccagctcttgatttcactgcaaagaaaaaattttgcataacctaaaattgcacttatgttggaaactggattgtcagttagaattttaagttttggtcccttcttccttatgtccctcatgatattctccctttctcaatcctctaagcagccctccttgttaggaaggacatgcttgtgttggtaaaatagaacatcccctccaggttcttcaccctttcacacaggagctgaagttgggggtggggtgggtctacctttcctgtcaacttcctttccccatcaatatcacagcatgcttgaaggcctaaaacaaagctagatttgagttacctaatcacaaaaagcatcaaaaaatgtctgagcaggtgaaaaacactcccttttgcatggttggctcactctgaaatgtccaggtggaatttgagctgagaacaagcatgatgaatcatagaataagatgcaattatttttacacagtttcaggtacctaaactaggtataatactgaccaatgagaagacctgctacccaacagattgctagagctttcaaagaggtttctacttatccaggatcctaccttgacaacaaccagataggttgaagtccttcatacacaagggtgaggaagggagaaggtaattcttgaacagaaactctagaataatgaggctgatgcaatctaatgattcagtttgtggccaaggctgtggcagtgtgtgtggaattgtacctcagtggtttgatatagtttatggccttgtagctcatagtagttcataggtacttggagtctgatcttcaatttacagagaagacgatctgatggccttggtgatatcaacatctgctggggttgctgtttacatttacacagggcaggatttcatgcattctgtcttctctccttgattttttccaactaagggtgactgggacccaggcccagtttccagtctcaaactccagacactgaagtgttcacaatgctaccccatgacccactttagctatcttagtaacttttctattgctatgatatattacatcagggtcaaggcaccttatagaagaatttattgggtttacagtttcagagggtgagcccatgaccatcatgggtgggaagcatggcaatagcaggtatgcaggcagttatgacactggagcagtagctgagagctatgtggagacaataaccacaaagcagggggagagagctaacaggattacatgggcttttgaaatctcaaagcttaccttcagagacacacatcctccaacaaggatgcacttattccttcccaaacagttccaaccattgtggaccaagtatccaaacatatgagcctatgggggacattatcaatcaaactaaaacatcagccttccctttcattctatatgcttagggaaatgagagtgcctatctcttctaagcttccagaaattgctgtacaatttagagacagaacaccatgacttaaattccctcatgtataatagaaaccaggaaactgtttattgcttattatttctggaattgtgagacatacaggctctctctctctctctctctctctctctctctctctctctcacacacacacacacacacagacagacacacatgcacacacagacagacacatagacagacagatgcatgcttaagcctgtagaggaagataatggacatctgaacctccctttccacagctggggctatgagtgaagtttgagtccagaggaaagtagacccagccttctagtccatttctttagagtttcccactgggacttgtggcctcaccttaaccctaaccctaaccctaaccctaaccctaaccctaaccctatccatacgcaccccaaccacttgcatttatttatcatcagtgcatgttttttttgtatgtgtgatttgatttttgtaaggagagagggtgatagctgaattagatagttaggtgcattgttctgcctttcaattccaatttctgttgtgattagcctttcattttactaatgcatgcactgattgtgctgcttgggtctcttgaattacaagagcaaactacaacctaggttgtatgtcaagcaccatttagagagctctacatgtaacttattccttccccacaatgagcctttatataagtattgctacaatgaagtgacagctgaggttatatgaagaggttatatgattttctttcaaagtcgcacagctaattagtgaagaatttggattttaaacctaggtagtctgacccagacagcatcttggcattcactctgtgatactatctaccaggggaaggatactggattagaatacacatttatctgttacataaatgtttctggcctggcaggtcccaccctcaaagaagcacatggatgctatattagttattaagctgttggctatggtttctaattggctagctctgtctttgttactcatcaatttctatcaatctatgtatttccatgtggtcttatcttaccggggaatgctggacctgcaacttctttgcctggtacatgatgactgctcagcgtctccgcagagaagagagtgatttcctgtttgtccctgcttatattatgattctgcccagaaacatcacttcctgcctgtctttacagatctctagacctctatgattagctagtggcagtttctgcccagctacgtcacttcctgggatcacgtgacaattcctctctgcctacacttcccagaatcctcctcatatcctggtcccacctatcttgctgccctattggtcaacagtgttttattcatcaaccaataagataaacatgtacacagaagaacattccccatcatttatcaggttccttggtcaatgtatggtattatttttcttttttcacttttctgacagggacagcaactcaagaaaagaaaaatttattctggcccccagtttgagggtacagtctatcatggtgtgaaaaccatggcatcaggtcatactgtatccacagtcagaaagcagagaaatgcatgatactatttggattgctttctcctttcagtctagaatccaagcccatagaatggtgtctcaccattcaagccaatctaggaactgtctacagatatgcccagaggttttttgcataggggattctagatcctgtcaagttaatagtcaatgtccagcatcaaaagtacctagtaagttgttgctcatgatagtagttatcttgtagttgtattgggagattaaggagagcttaagtgataggtcaattgtataacaaacttttgtggagtcagataatgaattgacaatatgcattcagtaactttcagttcacagcaggtaaaagagcagatggatgaaattgaggcactctgctgacaacagctgggaaccaaacaggaagtcactagaagagaagaaggtctgatgtgggctcagttatgggctgggttatctttttttttctttgaatttttttttttttgcagatttttaaaatttgaattagaaacaagattgttttacatgacaatcccagttcccttctccctcccgtcctcccctaccactccccccaacaagaaaccctacctatcacatatcttttctgctctgggctgggttatctttacacatagcttacttattgtggtaggtggaatccttccattgagaatgaaagattaacccaatagtagaacctagagtgtcaaatgaaagagatgaccccaattggtgaccggtgggttacctggagaaactcacctctcaattttggatattgaaaatgtttcactagttatcaaattaaaaattaagatccatgtattctgtgcatctgcaatttacttcaaaggacaacaagatgtggaaacacggtacccattctcattctacagttaccctcactgggctgcatctcttctcttagaggatccatttccacaagctcagcctgtgacttttctgtgactttttactgagatgactgctggcccctgtcagtattgtgcacttcctacccaatttgacaaaagcacacaaatgaggctgatgagagttagcctggctttcatttttgaggtgttgtgtgtcttctccatagttacgtggccatttttatacataattcttatgtcataatgcagctgctagggtgtatgagttgaactgtctgagctttggtggtgttatggcttgaatgtgttaaaattcatactgtaaaatccttgtacccagtatgatagtattaggaggtagggcttttggaaggagactgggtcataaagtagactattgtggatgtaattattgctgtaataagagagagctgcattttctaccaagagcaaggagcgatgtatgcaccaggcatctgatttgctgacactttcatattgaactcctaagcctgcagaatcatgggatgtatatctctgttgcttgttagctatctaaggaatgttattttctcaggcatctgcaaaaggctaagccacgcatagcatgatgacgcaatactgcccctgtgagattatgggtggttagggaagagtggcttacactcagaagccacaggaaccatagctctcatggcacttcattgttcacagagccatgatgtgattgctttggcaggtgtcttggcccttgaactgttggtatgaacagtagtaacgtgcagtggaggtggggtggggtggagatctccagtgggaatgagcactgtccttgaaaaagtattgctgtaacctctgccactgttctgggtgcttttattaggattattcagccttggcgatgggctggatttcagcgggataattcctaagaaatctttggctctttcagtaatgcagtaatccacctgcattacttcttcactccacgcccactcacatttcgtcttgggtttttcatgttctttcccatttctaaacctaaattcttctcttcgaacctaatggcctttgccagcgccacttacagtggctaaataaacacatgctgaggaaatgacccagtgagtaaagtacttgctgcataaggatgaatttggatccctagcatccacgtagggagctgaatgtggctgcacgtgtctgtaataccagagtagggaggtgaagacgggaaaatccggaggccagtcagtctagccaatcagaaagctccaggttcagttaggcaagagataaaggaagatagcaggcagacatgggatttgatctctggcctctacatgcagagatgcacacgcatatgcacctacatgtctacaacacatacacacactcacactcacactcacactcatactctgaacccatgcttgtaaaatgcaatggcttgtagcctgctagtaatttcttggtcctcaaccagaattttgaagaaggatttgcagttttctctggctcaattgcaaaaatccactcttattattatagaagattttttagagtcagatggtcaaattttcctccccactctgttttctagcttccagacaagttactgacctctgtgattgccttccaagatgtggaaaatgggaacaattgttttgcagaagcgccctgaagagtaaatgttaggagatggctgtaaaatgttttccacagtctgggatttcagtagccaccatgggacttgagtttaatgtctgctctggccttgtttaggagctgagtgaggcctattatggattggataatttgtagggcctgtgaggaattctcttggaaactgaagggagtgggtgcctgacatggacaatgcacctctagcattttctctactcattgaagaaaggaactggggaggaggggctgagtatggtgaccagagaacagggtggggctttgactaccggtaagaaaggcacaaatgcccttctcctctctgtcctcagaaggacagtaacttcccagcatggacactcaataactattgctgactgacaggccatggaatgttatagaaagtttacagggcagggaatataatattaatatccatgcgatgtttttatgttttaattttggcagaggaggtctgaagcctggggcaaaagctactattttcatttgcttcacctgaagttatattggcagaggccctcggggtaaagaagaaaagggttaggtttgggaatgggaaaggatatgaaggagttgtaataaaatatataagtgcaggagcttgaggaataaacacagatggatttcagtcagagaagagaaggatctggtataaagacattttgaaggaaaaataatacacccatagggtaggctctgctgaatggaagagaggatgtgagaagtaatgaaaaacttttaatatcagggaactccctaagaggtgtatggatattgttgctttacattgattgagggcctactctgtatggggctgccatctgcttgcaagcccagtgtatgaaaataagttttggcacaaggataaagcgagcatggataaaagggaaagatatattttttcctatgataggtgtgtggtgtgtgtgtgtgcaggaaatgaatataggagtgatgacttgatagataaagccttaacaaaagcatttgtaagtcagctgaagcaaagggcggtgtttgcagtgcagtaatcccaatctcatctaaagcaagtgacatcaaaattctacagaaaaacaactggcgttactgtgatgggagtttacactcatttgtagtttaacacgaacacggctgcatttcttgcttaccagagttttcaagaagattcctggtgatgttacaagtcctcattaaagtgcatgtatcggagggtcctctgctaccatctgaacagtgttaatatcttgtctttggcagtttgtagggttttttttgcaactttaaggacatttttttctttgacaatttcatacatgaatatatagagcatcccgatttcactctgcccactttgatcttccccctacacctatttcctgttctcacattcatgtctgtttgttttgtggtatgactcactcagtttaaccgaggccatctctgtgaccaaggcttttggctatctattgcatcatggtgggtccatcagtgcacataacggaagacaatgactgcctctcctccagaatccatcagtagccagtagttcagtaggattgtatagggcctcatagcccatctctgacccatgattgactgatgatagatattctggttcaggcccactgcaggcagccatagctgctctgagttcttaattgtattgcttggaggtattcccagtaggtaatatttcacagcacccttctccctatttttcagctcttgctttcttttcagtgcctcttccacagtgttccctaagcctcagagagggtggcataaatgtcccatttaggtctgagcacttaactattatttattcctgggcagccatgtatctctgtattcactgccattcattgcaaagaggaacttgtctgattaaagttgagagtagcatttgtctgtggagataaacataatatatagaaggtaacttgctgctgtgacatagttattaaagctatctctagtaactacctaaggtcagttatatgtgtattttttacagtattaaataacaactgatgatgacagctgtgagctgagcatggtataaaaatgaaaaatgacttgccaatcatggtaccctgtgtttaatgttggaggattatagccatgctgctttcaaagccaggagatattagatagcaagagaccactggggaagttaggctgctgtggggcttgttgtaagactatctgggttagcccccccccccccagcaactccagcagagagggctgtcctccagtgaagactgagctgctctcatagtttcagtttgtatgatctttcttttggaatgttttggcatcatttgatcaattctgtatttaagactattccagaataagtctatttgatgtctatacagtcactgaaagcaactttgagtcataaagggaaccttgttttcatcaacaaattgctcacattttgtcactctctgtacctagtcagagagtgggctggctttgcggtgataacaaaggattcccttttcaggactaccgagtttagttgccttagtattacctgagtagttgtgtagaatttttgagtataaaatttactcaaatgtagtgtacttgaaaattaaagtgtccatagtgagataaggtggagcagagctatggcagggggtcaattgattttttaagcagtttcctttctttgagttgaaagcctctgctgtgcgctggtttggacatttctctcataacaccattttgcacggtttcccattaccaaccagagcttttgctttgtcataccccctctccagcttggaaagttctatttatagatatctgtgtgactccattatgatttccagatcatattttgactgtcccactctcaaacaggtctttcccaaatactccatctaacatcctaagacaatctcatcaagacagcttccagcatttcatgttcctctcccttgtgctactagtctcactagcatatgccatgttttaatttacagatactaatcatcatatgactgtattaggtaccaataaacccatcatacattggaaaacattaactgtagcatgcacttagtcatctggcttaatggtactatagcttagtgtggactacctcaaataggctgagaatgtttgcataaacctattgctgggcatcttggggaaatatcatacaaaagaacttgacaagtggcacactgagggaacttcactgatggatttgtgattaccagggctttctgaaggaagcggttcattatattgaggttctgggtgttggtcaaagagatttaggtcatctagtaacccatagctggaatactgttacagcctcatacatgatcctagagccattccatcagctctatctgcttgtgtctgcactctgaaaaagattatgtcatcttccccgtccctgtttttcaggaggtttggatgttttacaaattacatttcctggaagaactattattcaaaatgatgccacctcattatccagctgaagaacctgggtgtacacgggtagaggttgaagcagaagtgacatggtgaatgtctgggtactctcacagaagcccatgataatatggcaagacaggcactttgccctatgtggaagaatgccagttggttttgtgatggtcattattattgttagggtgttttgagattgtgtcttgctgcatagacagtgagtttaaggccagcttcagcatccttagtactgggattgtacgagtgccaaaatgggtgtgacggttactactgaccaagatgtccgggctgtttttctgaggatagtcatttaactgggatggggcaggtggtgatggtagtgaaagaagagaatgaggagaacaagaaggaggagcacagtgtatgtgtgagtcagatttctgttacaaaaacgattagtttttaagaatgaaaggtttatttttggctcagagtttgggagatttcagatgtttggctttttcccattgttccttaagccaatgagccattgctgttacttcttgctaccacatgatgtcgctgttggggtggagtcctatccaatgctgatttgctcatctgctgtgactgatcgattataggctattactcctatgactaacaactattgtgatggaggttgttagcatatggattatagagtgacactggagggatgggagtaagaaataaagagtgaagggtatggttaggcaagaatgtgtggtttatacttagggcacctaatagagaaggctctaggcaaaacaagcgtgaaaggtagaaacagccatgcactaacctccagtttagtttagagtgtgtccattaattatcactgggcccacacagggagatcatttatttattttaatttttacatcagcctaaactccagttgttgtgtgcagttggagtcctctgtgagctgagaaaagatgtgattgatttgggagcaaggagggagtttacctgggtaaactcacagagctggacagttggtctccccgtggtcatccacccattggtttagatttgcttgttgccagtaaaatagatcagaaagctttaaaaatgactcagactctgttagtgttagatcccgaggaggaacattgtacttgcagaggggctagcctgtttgctgatgattacatgtcctgttcttggtccaagaaactggctgaccacacttactgcccttgctactagactgtcttgagaaaaagatgcccttgtctctgtgtgcagtgtgtgtgtatgtgtgtgtgtgtgtgtgtgtgtgtgtgtgtgtgtgtgtatctgcttgttgccgtgataaattccttaggtaggggaatttataaagataagagttttattttggtttatggctttggatatggacaatctagactcaggtgaggacttcacactgtcatattgtagggaattttgtaggagagaggagagtcatgagtagaacagtttaggggagccaccaggctctcttgtgacagttgctctcatgagacctagtctggtcccatgtaagctaacccccttcttcgagactagcatgaatccctcccctaaagtggagccccacaacctgtttgctttcaattcttccccatctttgaaatatttcaccaccttacaacacttgttctctggagacggagtttccactatataagccttttgggaacagaccatatctagttgaattcaggacccattgatttgacagcaagatataagtaactgaagaaatggagctcccctaatttgatggaccatttcagaacagctggctcttgaagtgaaatgaatcaccagaatcatctgggaatttgaggctcgtggggtcacacagctcatctccagctcttctcaggcttgtggctgtgccatttacttctccaccgagaccccacaaccaaacctgtagtccagttgctcaggaccatgagggtgaagggcttctctgagtatttaaagcaaagagacatgcagccttcatggttgcattttaataccattccctccactgaaacaccctttttcagtgttctctacatttgaggtgacaaattagacaggtaaagagctttcggtggcaagttgactttatgtaaagtctttagactctgtccttcagacagaaacattagattaaggtatgaacaaggaaataagtttcacatttgtgtcacaaaagtcatggtctcccttacacaagacctgcatctgtttttggaagaaaacattcctttatgcctgacagtctccttctaagtcttgcattttataaatcagttgcttatcagtggattcatattctctgcattcattttcctctaactgcctctttctctcttcccttcccggcttatgtccttttataaacaccttggatctaggcactgatcccaaggaaacctctgatccgattctctctgtctctggagttcccctctggcgagaagctcacaaagggtgtcagatgctcactcatgatgcatctgtgacagtcccagttcccaaacgccacggaacatcaataagcagacaatgcccactgggggatgcccacatgcctgaggatgggcatcagtcatgtggtggctcggtgctgacccagctccagattcacggctgctgtcagctgtgccttgtgctgcctgagagtcactgggcctgtctgaaggaggcagctgttgtaaattacaagtgcagatccagaggataattcttggctttcaacatgctgccgaggctttggcaattaatttcctctgttctttgcgtagccaaggattctccacattattcatctctttgggcaaaagcctttggtggctcctgagttattttctcattaggcttatgataggaattacctgattgtagatggcttgttcttgtagttcattttgcaggtgcattctgactaggcatggcttcagcagtaatgcaatcaatcttaagctcacaaggcagagttcagggacgcatttccatttgacctgaaagtacctgcatggcactttcaaatctggaggcacaacttgctgatgtcttaagatctaggggtggctggcttccctgtgtgcacctggcaagacccaagtagtttcattagaagcctgaacctggattcttgtttccagcatctttctagtacttggatgagaaaacataaagaaagccacaaaaacaccagcctttctcactgggaacagaatgtggtttgaagacctggggtcctcagctgtgggtgggagtcagaaccccagacttccaagtctcaagtgctcagagagaattgagaagagcaacatggtggtgggggtacaagtcccattttgcaagatctgctccgggtttatttgattttgtttttctgcatgtggagggttgatgaaatcacagccctcatgctgctcctgattagcagtgtctctgctgggtgtgttggccagcccatgctgctgctaagtcagaaatacaaactctgtgatcttctggacaccccaagatagggccaaggaaggagccatgttcagatggtaagcatgttcctgattcctgggaggccagcatgggcatcctgtatcccaggcatgggaatcaggatgctccagcttttccaggaatgtttaaggaccaggatggtctgcggtgttcttagttgtctttgtgcttagaaacttaattcatgtagtgttgtccattcttggttctgttcccagggcagactgaatacttactatgtatttgatagatggatgaaaagatcatgactcgggttgtgagacccttgttttgatgcacattttgtgtgatacaacttgcattgcttttcttccctcttttgtttcagaagcaaaattttcttacaaactattccttgactgtggaagtagccagctcactgtaatgtaatctgaactactcattctctctgagatgtaatggtaggtaatgaataatttaatgtactattctcaaagggttatgtacatttcaacaagtgacaggcaactggaaacagtaatcatggattcagagcttgtatggtggttcattgctgtgagcaacttttctgagccaggtaaccaccatcttgtggagttcatctgtgctgttttgcaaatggaacatcccaacagggcttgttgactgtttatacactccatggagggctgaggaggaaggatcaaaaggctctcatctaagtatataaatgctccttaattcctgttgcatgccactctgacttaattgcatgtggtcttagggaggggctagagtacacaggaagggtgatgggtggtatgggacatccttaatctttaaagcaggctaaaggttttccatgtttggcctataaagggagaaacatttacatcctgtaaataaccccttacctatgtgctgcaaggaagcctaataaactcattagttccccagagtgaactttggtggtatcatgtcttggtttgtctttgggaccttaggagaaagggaagatgttgcttatgttttcccctaggaagggattttagcaacactcgttactgaatcctggtattcaaaaggatgaggcaggggggttgctggaagtttcagcccagcccgagaaagccctgtttaaggaaaatcattcttcagtggaagtttaagttgttcacaaggcaccattttgagcaaagtgtgctgcttctacctttactacagtacctggctactttccatgcctttggcattatttttccatcctggatgaacctgcagatgatctaaaagatgatcaatccttcaaatacccaaattgctctggggcagtgactcatgacttagcacagaacacttgttgagaaatcccagccttgtccctggcagtgttgtgaccgtagggggccaggttatcacgacggaagcacaggcaggttcaccactgccaacttttcagaatttcccccatcaaacaaaatgtgtgtgggcctaatgagtcttgaaaataatttgtagctctgacaacctctttttatggcaggcatgtgttgaacacgaagtcataaccatcagttcttcagtgggcgggaatgaggaggagacagctctcttttggcagaggtggggaggctgagctgtgtgctcccaagacagcttgcccaaggtcattcagcaagttggcaaatggtgcctcctccttcccaggccagcttgtcatcatcctgcacgcccatcctcccactgcggaggcagagtctgttggagcctggcttcttgctggggctgcagggaatgtgggctcagcagtctggtttgcaaaggcacagaatccagtgccaggcatttgctgcaggtatgtgctgagtgttcttctctcactccctgcatttggaacattcagcatataaccacacaattaattcattaaaaatctacttgcaggtcacctttaaaacaaaggaagaagcaattttgaatttagcaatttttcatttttgacatctagtaccacctcaagctctgcagttacaaataatgctggtggtgaacgggttcttttatgcacattggaagagagaagggctatacattatgaatggaacaaggataaaagaattggctgtgtggtgcaagatattttgagtacattaatcagcccatctcttttagagtgagaatcatttttaaaagtgagtatggaatagaatgcaaacaattggtgcagtgcaagtctggttgatgtagagtggacatataagggcaaagggataacaagaaggtacccagaacaaagcatgtacgagtctgttcctgagataaagtaaggcaaggaaagaatagagttttgaagaagcatcaagatggcattggatccttcacgtagtcctgtagtgcttggcatattgacatgtttatttcacaagtgaaaagtaagtgccctgccctgactcacattctaagaggagagaatggtacctattcagttagctccaatcggatttgctgtgaagaaataaatatgaatattttccatgcattggataaggaagggaaggtatcctaagaagtatatgactacacagttctgttactgtgtgatattgcgtgtactttacagccgaagaggactatgactatggttccgttaactgtgcttagaatgtatgggctttcctggtatgcatggcctgtttttgatcaaagtattgctgtgtggtactgaactgtaatataaaacattgtcaatggtagcttaatatttttgcatatagcaagtctagtggtagacagtcatgagttcaatgctgcagtgacatggatgcttatattgttgtgatataaggtgggctcaagagggtcagatagctgcctgcctttaaaacatacctaatatttgtacagtagtgttaactagaacagcatcttgggactttaaagtagaaatttttgacattgtgaatacttgctcaaagttgggtcttaccatcacttggatcttacaatacagatgaacacattcttatgtttatcttccagatgaggagggtaagtaacctactcaaggtttcacagaaagtaacggcgggagtagagtttgggttcagtttctatcagagttcaatgtccaggaagtctgtggacatctgcaagtatcctgtgccttcatgttgactctgttttattgtattcacccatctgccattgttccactgtcactccagacctttgactcttcaagtgtttaagtctctcaatgatagtttttcctgtgactttgcatcttgagtcttagcccttccctctagaaggagtcttgagatcatcagctctggagttgatctttggaagagcatagttttgttttctctcaggctcatttatactcaactgatttactaagtgttttcgtgggaggtgtttgtttcaggagtagggaatcacccttctgcctggtgtacagtttctgtcccctcttgttgcttctttgttgaaggcttgtgacttctctcaggttgcctttctcaagaatggccccacatgctggtaagagcacttagttctttgtggactgttgggggtgaacttggagctcagagaaggccacatgtaattggctcattggtaatgacaggtctattaaggggggtgagctccttgaccaattcctggtgttaaaaacattggtgtactgtgtcagggaggccctgctacagcctacagtgctatggtctctctgtgaagcatgggatactctagttgaggccactatggcttctttgttttctcatgaagtttgttcccatctatgctgtggtctgttcacagtgttggtttgttgtggagataatctctcctttcccatcccaagcagcagccttctggcacaggctcttgtcttgatatagcttggcattgttaatctgagatcagagctctaaggtagaattgaggttttcacctgttctaaactcaaggctaggagaatgtcatcaggccatgaacatattctgtgcagtgctgatttcattaattaattgattcattctttaaaacttgaccttgttggcctatggggctatgtattacttattagtatatcagataggcacagtttaataatatgtaaacttagaaggaactgataaatgtgtccccctttgccttcctatatataagatgtagttggaatctttggggatcatcactgtagccaacctgggcacaaagcagtgaaaacatgcaaacatgtctaacaacgatggttcttcctatgacccaggaagctgattttcctgtgctaacgctgaactcttgcattctcactaggccatatgttcttaaaaatcggaaaaggcttgctgcacatagcttttggtcaataaaactttggggagagtgctagccgggaaatatgacacagcaaaatcaggtagctgctggatgtggggagggttgaattctatagaaggggaatggagagctgaacagaattctaagtctgtttcctacccccagaatctcaggctgccaaggaaagctgctcatccatgaatgaggattgaaagcaatattgctaaagtttgaaagaatgaggtgacatctacaaggtcaagtaaattcagaagctgacattgggtcacaactaatgtgggtcagagaataaagcattactttgactccaaaggcattttattttagaaatgggcagagaggctgagcaaccaggcatgcctgtgtgactcgacacaaacagcatggctgtctcttgaagcccatgaaaatcaccccgtgctcttcaagtgtctggtgcaatcactgtctttcgaaagcctgaattctgtaccccccaccctccctcctctgttttctcattgatttcttctagtctgatggagatagaaaagaattcatacatgaactaagctggtgttcattggttggtgactcccagagccataaaaaaaaatatcaagtgcaagtaggtgatggtttctagaacaggcaagatagaactaaatgtatagaaggaatgacccattacaagctccgccttatcaaaatggttgccttggggtggaaggaatggactggatccactctctaattattctaagtctttatgaaacatatgactcccgccaggaggcctgttactgaatctttatccccctttattctccctgctgcctaatcctggattaaatcccaaattgataaagcgcctttgctagccacattagtgcagtaagcaagggcctgcctgctgccaggacatgctttcattcttttggaaaaacaaacaggaaataatgatggacaccatttggaaactgaaggggaaaataaataaataaaaataataaaactattactgcaggcgatctgtgaacaggaggagaaaaacaaaagacctgtgattttgattcatacctttggagagggcttccttaatgactgctcttttgtgtccccaaagctgtgctcattcatcagtctgtggtttaatccaaacctatcaggatgaaaattcaaggaggatgaaggttaagcgacaggcattctctcctggaaatgatggagttgatggatatctagaaaacttgccttagagactgagaggggaaaaaatctctctagagccacccaaaaggacaagatgtggtggtggggacatctgtccagtggggttcacaatttccatagtgccaccattaattgtacattggacacaaattctgaactgcatatttcctaatatcaattttgataaatttgaggaagtaagtgtattatagtagaatactatggcattaatcactggaaaaccattttttaacacattagtttctaggaagatgtctgtagcaaggctgtctggcaggtcttcctctcagcccaggtgcttcttgggtaatctggttttcttgccttgtagtacaatagccaacaagtaacaggtgctcattaaatacctatttaagccaaattgaattgtaagctgattggtttttttggggggcatttcccacattgattgagcctcttctgatggaatagccacccctggctactaaacttgttatagtggctaagagcttgacttaggaatcaaatttggaatgatctgaagctagtcctttggctccatttgcttcaagtataaagtgaagatagctatgtcatggatttgttagaagattaagtaggcagagtgaagttgagaagagatcttagtcaataaagtacttgctctgcaggcgtgaggacttgagttccattccttggatgggtaaaaatgctgggcaagattgcacatggttataatactggcactaaggaggtaaggagcaatggatctctgggatgactggccagtcagactagcttaattggtgagtttcaggccaggtggaacaccttgtttcaaataaacaagggtggatgctacgtgaggactggcatctaaagttgatttctggctcccacatgtttgtatccgaatgtacatccctcacacgaaacacacacacacacacacacacacacacacacacacacacacacacacacactgaaatggattcatatttatgaagttattctgggagaaatggctattttgatgttttcagtgctgtgcaagagtcaaatgcatacttttttattttttggtttttcgagacagggtttctctgtgtagcttagagcctatcctggtattcgctctggagaccaggctgacctcgaactcacagagatctgcctgcctctgagtgctgggtttataggcgtgcgccaccaccacccggcctgtatacaatttgttttaaacaagcaaaaatcacgagtgtctatagaaacttgaaaaatgaatgtggcgtgagtgatgaaacttgctttgtttcctgtgccatcttttccagaccagaaacatactaagaccatattaaaaggcgacaaacaacttgatatttacaatgttcatgcacatgagctgtgcagtgtaatggctcctcagcaggtgcaggaaaaagtcaccatgagaggtttgcatgctgagttctttttccacttttctttgaatcagagataggcctctgtgttggtgtatgccattttagtggattatttttgtttctcttcttctaattaaagagggtctgacccaaggagaagattgactcagtgtagatggcacttctttggcatcaaaagcatggatggcaagtctttccttgccagaattttcccttttctgatgagtggaatgctgctttgattttgctacctttcgtgtctatggatggctgaaagggagacctttggaagaggacctcctgtgcttacagttgaacaagatgccatggtgatgggttggagaatttggaagactcattcatgtagcctctcagactccaacaaatgaggctctttgtgggtttggctgtttcttacagcatgtcctgttgcccaagggacaggttgtggaatcttactggtcttgtggattgctaccagagttggcagagcatactcacttcttccttaggctatcctgaaggtaggagtcccccatagactttgtctggccgagtcacataggctgcaaagtaactatactgtgtgacctgtcaatcttgcttccatgccctttgtgacacatggtgctagagtgtgtctttcaatgtgctctctcctcttttgaccctatcacaagactctcctcctgtatgtggtgatttctcagtattctcatttcctcagaaggtcacttcagaaagttcatgcttaacttatttagagagataaacaaatattgttataatgatgactgtcaaagaacaaatagtaagaacatcagaggcttaaatacaagaatcaattaaggagaatcagacatcgggtccagctgccttgagtaattttgaagtataacttgatgttgaagatgtttaaagggagcattaagtggagaaacaaacaacccatatcattaccacaacagctgtgagcttggtcagtggcatctcctgccaatgataacttggtggtacagaatcactcagtcatggaagttgaaagagtcatgtgacccaagagagctagtgggagaattctcaaaacacaaagaataaatggattagctttagcttatcgtctgtaactcattgctaggctgtggagatgtgaggctcatatactcatgcttttgcataatacttgttggccagagtgggtgggagtttttaaggagacattgggaggtgtaggaattagaatgcaagtgaatctccaacaatgatggagttagggctgtctaaaatttgatcctaatttgtgattctccccaaatttaactacaaacagcctactgttggaagtgatgtgattagcagtcaatactcatttcatactgtctgtgcacaccatcatgtgaagtatgtgagagccttgaggaagccctttgcactgtaacacacagaatactggagacacagctgcttacacaggacagggtcacatggtgttttaagtggataattccacacttgagtccattgcagtagcaataggaagtagctacatagctattgccgtttctaacttgactacagttaattcagtgcagctaggatttcagtgcatctttatatttgtttgtttccttcaactgtggatggtgctatgtgtgatctgagcttatgtgcatacatttttatagatttttaacttttcataggagagcatgcatatttatggtatattaaagataaaatagacttttattcttgagttgtatttttcttagttctttgatatgttgaagctatgttgtttgttttttcaagttgccacaaatctctcaaatcaaaatctccatacaagtgatcctagtagttcaaagggtgttgttaaagggtaaactatatttgcatatgcatatgaactatcttggagataggatctaagtgtgagcaaaaatccattcgtgtttcatgtatatactttatgtattccctaaaggcaattttaaacaatattttagcacaattttgtgcatgaaacaaaatttctttgtgcattatgacattatggtgctcagtaaggttgggcttttgaagtattttggagttcagattttcagattaggaatgtttaaactatattattctagatatttcctatctatgaaattccatttttaaataaaaaacaacagtgtgtgtaatttaggaagaaccttgtttaggtaacatgactatgaatttatttaaattagggtgactttattatgatagcacaagagacaaaatctacttctgtctgaggggagtttggatgtatgtttccctgaatacaggaccacagtatagagcttgggttgatgttagtctttggaatataactaaaggtcatcagattgtaactttctcacttattgtactttggaagatgagagccaaatttacaatatcattctcctaaaacaatagctagtgatatgtttttctactgttgagattttcattttttttaaacaaaatatttttaatgtatttgtatataagtgtgtgagcatatttatggtgtgtacacatagccagagattgatataagctttccttttttaaaaaatatttttatttttattgtatgtttttgagtattttgcctgtatatgtatgtgtatacataatgtatatatgtacacacacacacacacacacacacacacacacacacacacacacaccaatacgtaagtgcctggtgcctagggtgtcagaagacaatgccagatatcttgaaattggagttatgaatggttgtgagtagtcatgttggcactgggaaacaagctatggtcctctggaagagcagtcagtgtttagccaattatctgtctctccagcccctcagatgtcatattaattgatctccatcttgtttttgagacaggggagttcaccaattcagcaaattggctggtcagcaagccccaagtggtcttcttgttctggtgtctatagagatccaaacttagctcctcatatttgcagggtgtaatattttccccattgttgtgatgaaataacggatgaaagtaattcagtggaggaaagttttattttggcttacagtttgagaggtaatggactcattatggcgaagacatcatgaccacaggagcaggaagctggctgggcaggccgtgtttacagcaaagaagcagaatgctatgcatgtttgtgttcatctcctttctctcttttatgcaccctgggatcccagcccatgggatggtactactcatattcaggcttgtattctcaccatcaacaacctgatctagaaattcctttcacagatgtgtccagagactagtctgcaagatgatactagatgctgtcaagttggcaatcaattttagccatcatacactcaagcacttcccagagtcacctcttcagtctccccccccgaaaaaatactttgtaaattggcaaatagtaaaactttttatgccgtcctctggatcttcccactaaggaatttactctcctaatggagacaattggaaatttatgttaattccttccatggcatgcatacaaggtggggtctggggtttcacttcaataggcatagggcttgaactcagattttctagagtaatattctttatcttccaaaaattactgcaactgatttctgtggaggtgggtaccttctgttctctctctctctctctctctctctctctatctatctctctctctctctctctctctttgatcatccctctagcttttcactgaagaatgaggttatgagagcaatgcagcacagccacaaagatttggctctgttctcacttccccaagaaagctgaacccaagccatcagcacatgatgaccttccatagttgaggaaaacgtctcttggttaggctgatacccaatctgtgcaattcacttaataaagaagtagcaatcttcccttgatgctgaatgggttcagtttgacccctgtatcttgaactttggttgctttcattatttcgaatgaagacagtgtggttgactgcacacaattgctgaccgccttacaaattgagagacatatggcctctgaaaatcatggaaggactgttcaggatgacagataatcttctgttggctactcttgtcccagagcaatttgatagcgctgacttttgtgcacacctggaaatgctgctcatctaaacttctacctcaactaactttgagctctgtgctgaaccccaaagacttctagggcttcatctccaagggaccccaatttcaaagaagctgttctcttggacagaaggagagaactctattactttctttttagactccctagcagctcccagcagcgaacactcaaacttaaatataaattattcagcactgctttctttgagtttcgtaagcaatattggtttccttttcttccttgccacgactcctttgtcctttactgggaggaataaccttccttttacactgtcattgacttgggcagtagcatatttggggcaacagcaaagagaaattgatgctaacctcagtggctacaaccttatgtggccctccaaagtgcttataagagtccccttccatttttatgccatatgtcaccaggtttggtttttcctattttaaaaaattttaatgctttattacattgtgttgctggggccattttccccccaagagaagaatgattgcaataaaggtctgacatgtttttttatgaaggctgttctccacaagggctgggccttactattagagtgctgtcaatttcttttgtggtatttgtaacgtggttaccaaatatagtccctctcatctcttgaattgccttttatagttaaccgattaatgaaatagaaataattatgaaactgtgggcccaagcactaagaggaagaaaagaactgcctcaatttcatcaatttgcaatgaactctttccttttatagattgcctgtcaactaaaaattcatttagaatgctgcatgactcagaaagattttgcacttctttaaaaggaaggcacgtttttctcagaaaggacaactgtatttctgggtatttcctgttttataggcaccagggctgccccttcctgccctcctctcccctcccctcctcgccccttccctccttcacttttctcacctctcttccttctcccccacccccttttcagtgttggagaactatgacctcacacatactagacaaattcattaccattaagttgtatctccaaatcaaaattttctctttttcttccttctttctatgtttttttgtggttattgatggcctgttatatggcagaaactctaatagattaaattgagttgatacaaaaagaagagaagaccatacagggctattaaggtgttgttcagaggacaaataaaacagtgatgtggtcgtagtgaatgtgaagatagaaaccgtgctgggtactgaggtcgctccaagaagtatgggggatgagaggatgagtgttgtcttgggtgggggagttttctctgagaaggtgacttgtgagctggattttgatgtaagagtaggatcttttgggtatagttcagaggatggaggtgtggccaagtgacggattcagaaatgtgatgctgaggaagaagtacttaaggaatgaacacaatgtgggtactttccaaaaaagaaagtggagacaaaggtacattttactaatttttctcactatggtggagtaagtgacatccataatttatatagagaaaaggcttatactggttgacagttttggatcgtctggttcacgatctattggcactgtggtgaggcatcccattgtggtgcaactttgtgactgagtaaaccacctgccccatggccaggaagttgtagagaagaaaaggaagcagccaggctctcaccgtatcctttgaggatatgcttccaatgagttcaagaacctcctccagacttccaccttttgagggttctaccattaataccatcctaggggccaggcctggagcacacgagctttagggagacattcaacaccctaactatatgatatgttttctgggttgagggggacacctacagctattatcaatcattgctggtgttataacatcattgctgacactaattatactacatgtgtaaacacttcaaataagaggaaactgaggctgacagaagccagttcactcagagttgtgaagctactgaatggcagagtcaggactccacaatcttagggacctatctcaatagcagtgcatcagaagcagggacctacaagaagtattgacctttgaaaccaactactgtatctgatgacaaactgaccccaaagtcccatgacccagagctttagaagctcactgtttcttaggaaactcagaggtaacagatcattggttctacagccttttgctgactccagtcatgttcctcttaacttctttggtgcagacaaggtgaggaaggcagtaaattgtgctgaggccatttgaatgctgatttagggaagccttttagcctcaagtaggttatgctgaagtgaaaaatagcatccaggtatcaattccttaagacaaaacccattgacttggtttcacgcacatgcctccatgcagatgcaccttgttgcccatgcaggcagggctcagatggtgagccagctctcgtaccatcttacagcactagcttcagcacagtggctggtgctatagagttgagcatagctatgcacttgctttgtacttgtagggttacacattactcctgatgtcatttgatcatgcaggacaagtcttgtgactagcttgatttcaaagggctgagagatggcatgtgtgagtaatgttttcttaggggcacggggatgcagatacttccatatatcatctccaccttcaaattttggatggcttcacagctgccacttctgctgttgtttatttttcttacattgttgcaattgtaactaaccagacatatcttttaaaataagatgaaacccttagtttttcagctgtactagttgcatttcaagacctcaataaccaagtgtgaccggtgtctagcattatggaaacgacagagatgaaacattttcatcattgtagaaaactgtattggacaataatgtctagagcaggggcaagccaacttttctataaaggccaaatagcagatagagcttgcaggacatatggactctgttgtaagtactcaactgtgctgttacatggtgaaggcaatcccagatgatatgaaagaaaacaagtatgattgtttcccaataaaactttattaaaaaaactaaataggctgcagacagttcaggctcacagctactccttttgcagtccctggtctacaccaatggtctccacaaagagtgggagccatttttcaaagaccacccaatcagtatagaaagaaaacattaggttttttgtttacattaagaataaactccaaacattttgtatttgtaccaatcatcttgcatggggtcatgtgtgatacatgttaagcaggagtttcaacatccaggaatatgtaacatgctgtctattggcatccctcactgtcttaacacagtgtgacagaatgtaatccatatagcttagttatatgacaatggaattatatcataatgtgaattatgtcacctaatttgggatctattaaccttacccatgtgaagaaattaaaactatttctgccaagactccaccaagtattgctattgtttttttgctttattcctcactctgcatatgtcacaggggtcaagacaacagtagccacattcctgctttgtcatttggctctctgttaagttctgtcatcctggaatgtaggaggaggaactataagtaagttccttcatctgtctgctgtttatgcttttagtcaccccaactggttccagtagcagcagttggtcccattcccagcttcttcccacaccataaaacccagtgcagcagcaccaggcagtacccattccttgagtctgagccttctttgatgggctctggcacccaggatagccctatttcctgtttgttttcctccccttttgtctttttgattccaactttgcaaagtcattctttctgcaactagtgttaccttttccccctttaattctctcagtacttctggaatcaattttctttaaaaattctctgttgctcagacacttacagtagattaaagtatacatctgatagtgaagtatctgtcaacagtaatgtgatagcattgacaatatatagagtaaaagacaagacaatttaaccagaaaagtaaaaatgtcacagaaaggactattgagaaatagactgacccttccttccttccttccttccttccttccttccttccttccttccttccttccttccgatggaacccagggatttataggcaagagctttaccactgagctaaattttcatttcataaagacaaatttttcattccctacagttctggatgaatcttacctctggtttatatatgtttgaagatttcagttaatgatgataagaagacagaggaatgttactataaatctttctgccaaaagctgcctgagccccactgccacatgtgagctttacgacagctgcctgcctgagttaggcccaaatgaatacacagagagacttgtattagttacaatgctgcttggccaatgactaggattctcatctgttagctcagtctcaattatcatacatctatatattttataagacttatcttatcggacgccttattggcgtccctcctagctggtggaacacattgtgccattggagcaggagccgagggaaaaagagggcccttcctgtttctctttcgcttaaatatgagtctccttgctatgtcacttcctgcctggatcagcacttctctactacatttcccagaatcctctttgactcctagttccatctaacttgctgtctcattggccaaacagtattttattcaataatcaataagataaacatacatagtagtacattccccatcagaggaacaatacaaaagtaaagcatccttcatacagggaagaaactatggaattcttagagagatttggaaccatgaggtagcaggtatttccacaaatggactaactccattcatctcaactgtttaaaaaatagttttctgagtgtaggcaccatatttcacttaggtttaatgctatataaagaacttaaggcagtttgtagcctgcatagagaattaatgtgttcactaaatgaattaatgtgtgctaacagttgttctttctatcgtcgtcgtcatcatcatcatcatcatcatcatcatctatagcaaatcctcagacagaataggcagtttttgtataccttagtaaccaagagtaaaattgaaaggtaaacagtcaatactaatataaatttgtgtaacctatataaaaaacatgaatgaattatttatagaactgttaacttaaaaaatgtgcacatcctatttgcgtgcagatggatcgatacggggctgtaaatcagttcttaacaactgtcaaaggacttaaaacacttataattaacctagaaattaatgacaaaattactagaagattttcaagtgttaagtggttttgaattatccatgggtcaaagaggaaaatatttctataaatgataatggaaatgtcagtcatgacatgtggaatgctggcaaaaccacatgaaaagagaacatataggcttaaaagcttgtagtagaatggaagagtagtaaaagacaaattaagaatattctacaaagaaatcagctaaagagtagcaaactaaactaaaagttatcaagaggagaaaaccataaagagaaactcagaaataaaggaaagaggaaattaatgagcagaaggatcataaggctacttttttctgaggaggctatgaaattcataaacctctgtcaagttttacaattagcaaaaacaagcaaacaagaacaacagctacaaaccccaaagaggaaaatggagaataagaaatggtgcatcattctgcaagctaattcaataaatttgaaatttgcaatatagtgggaaagtgtattgagaacacagtgaaatagataccagaggaaatagaaagttctgtgcattcttttgtttataaaaacattgatagaatctgaaagagccaagtaaacagagaactatgttgtgttcaagggtaagaagacccagaaaactccctgtctctctaaactgggccatgcactcaggactagagctgtgtacacccagcgtgcttttgctttcatgatgctagtatgaataataagaacctgactctaaagttttcatggaaatgcccaaattccaggagagcagagacattcttaagtagatctggataattttagcttgtatgagtcatctagtaaagacagtagtgagtgcagtgtgctattggtgcacagatgcatgtgtaagtgtaggctttatttagtgcaaaacttttacttaaagtgtagagggaaagaacaatattgtgtttagtaattgatgctgtgttgattttatatcaacacaaataatagaagtcttaacttacctcattatcaatacagaaatcacccatttcaatagcagacgagtaggaaaacaatggaaatttctagaagataatttaggataataacttctgacttaagagtgttgatgactgcccaggaaaggttgatgagcatgaccttatcaattatgagagtttctttatatataaaaaaacccttacctattgactgagaaacaagtgtttggggaaagtatttgggccacaggtaatagaagggtttgcaaaaattcctacaaatcaatatgaaaaagtgagatttctatagcagttcttcccaaaaggtgacatttaaagggcaacaaagactacaaaaggttccaaagctcatcaatatttaggaaatgcaactgtccacttttatactaggccaaaaagtcttttgttacatcattaaacagaatcaaggccaatgtatgtgccagacaagtttcagggaatttgtcttaaatgaaaaggtagtttccaaaccacaatagtgtcaggaactccacagtgatattatgcctactaattaataacacagcctattgacaataccacagttgcctcagtgtatgatgtactcactatgaagcctgaatgatgaggaaggaaactgcctaataacatctttctcagactaactctcctttgttaagcaaaacataactctattgaaagctggaccacagaccatgaggaaagctatatttagatgctaatggtaagaaaagttgctgagaatgtggaatggtaagaatttttctttttaaaaattttgttagtatgtaataggttttatttttaatgcatatatatatatcattatagtttgtttttattcttcttgccttatctctattccatcacctttcttcaaaatagtccatcctacttctttcatgaggttggtagggtggcaagttgtcagccactatgggaacgttggcagtatctgctgtacatacccactttctgaacctgtcatttcacttctagaaatatatgcagtgagaatgtataaatatgattgtaaatatatatgtttatttcacagcaacatttatttttggtagtgaaagattgagagaccttaactattccccaaaggtgggataaacatattttgatatatctcatttagtgacactggagtcaataaggcaaacaaaggcaatactgttccatgtggagatcagaggacaacctgtagaagttggttctttccttccaccatgtgggttctggggatcaggttgccaggcttcgaagcaagtgctgccgctctataaccatatttttttatttgaatggtagcccaatagatgcatccaattccttaaaattagtaaactgtacatttctaatttgaatactccaaggaaatatatgtataagtactaatttcacaaggagagacaagaaggcatactaggcagctgggtgagtgtatcaattcttttgcatccatgctgtcctcactgaatacccctggttgttagatattgagctgggttcttgagaaaatgctctgccttaatgactgtagtgatgagtatcctttgggttctgatgaggcctgggtgactgcagactaggatcatcaacagaagggtggaacacttcactgcttcacttagggctagtacttgagaagtccatggctttggtaggtaagacagtttgaaagttgtcctctgctaagatgcatgttgcacttcaatagtattaggaaatagcactgggtggtagtggctcacacctttaaacctattactcgggaggcagaggcaggcgaatctctgtgagttcaaggccaatctggtctacaaggcaagttccagaatagccagggctattacacagagaaaccctgtgtctaaaattaaacaataacaaaaagaaatggttacccactaagttaaccttgctcaagtaaataatccccattcatcctcatgcaaagtatcagaattaaatgcaatgggactctctctctctctctctctctctctctctctctctctctctgtctctctctcacaccccacacagacacccccaaccctgcacaccacactctcactgtctctctctctcactgtttctcacacaaacacccccccccctctctctctctcacacacacacacacacacacacacacacacacaccactctcttgtattctctcatacactcatacacactatgaaggtaggagggaggcttgtagggaaggagggatctagtgggaggggaagggaattaagaaaggataatgggtgatgatggggtggtccttctgtgtgtatatgtttgtcttattggctgataaataaagcactgttggccaatagggaagcaagttggtgggactaggagaggaggaggattctggagaatgtaggaaagagaaggagtcaccatgtggtcccaggaagagaggatatatatatatatatatatatatatatatatatatatatatatatattgtgtgtgtggtgtgttgtgtgtgtgtgtgtgtgtggttgtgtgtgtgtgtgtgtgttgtgtgtgtgtgtctgtgtgtgtgtgtgtgtgtgtgtgtgtgtgtgtgtgtgtgtgtgtggtgtgtggttgtggtttataattcagactgagctagccaacaagaaatcctagtcattggccagcagcattgtaactaatataagactctgtatttttcggggaccctaaagaggcggcagaacccaggcagctggtggaaagagttattatggggtgatatgatcaaagtatattatacatggatggaattgtgaaaatataaatgtaagaagtagtgaatatctttaagaggtggctgtgccatgagtgccccactcacatggatgggattattggattgttgctataataaaatagggagctttgtctctctttctctttctctcatgccctctctgcccccactcttctcttctttcttttctgctttctgtatcttcttgccttttgctaggtgatgacacaagaagcctttcacctgatacaggcactgggtgtccccatttgtgaattagaaggcaataaattctgctcactctaaatctctctgtctcaggtattctgctctagcagcgcagaccaagctttgggctgacataaagatacactagtgatctcccaggtggtgagaagtgcaggatcatacttttcagcagcgctctcactctcatttgaagctgtttgtcagttaaacattgggtgccatttaacaaggggaaacaagcttgctggaaaacttgctacacaaatgaaagaaagacggaagagtcttgacaagcttagccttattaaaaaaaaagaaagagtataaagggttatatattgccaactggtaccagccttgaaagagtcataaaaaattcggggtctacagtgagtgaccttctgaaaatttgggtacaatcaattgtatgtaagcatgaatgtttcaaaaatgactgcaaaagcaaaaatctaaatgctaagaagaggatgagttgatgatgaaggatgccatgagtctgaaaaggacagaaaaactgttctatcagtggctttccaaaaggagccctttgcagtcagtgtttggatggtctctcatgggtgactgattatgtcttctgctggaagtcttccttcactaccatttagacattcacctttgttttcatggtatagtcacttactgcccactctgttataggtctagagtgccaaggggtccaagaaatctgttttcagagagaggtttattttcagttccctctcttttcccatcatgctcttttccaccaactggctgattgcctagctgcatcacggacagatgactagtcatcgaagtctttcttgaaattattctctattcaccagatttctctttcctccattatctaaatttagaaatgagttgtcagtaggcttgatgtaatcttcaaatgaaccaattattgaacaccagagctcccagcaagaaactcaaggcgatttttgcctcattacagagagactgttgaatgattcctttcattattggttgaagtcactcctattacttgagtgatttctactggtgtttctccaggaccagcttccttggacccaactgtccctccagacctttgtttaagtctaatctcctagaaattcctaagagtgcatgtgtttgtaaatatgatttgcatatgggtctggtaagctgtttttcatgttggctattttctaaatgttttatttgaaggtatctcttcacagcatacatcagatgaagtataatgtgagcaatttaaaaggtatttgggactgtgaagaggatttctgtggttaacagctgtatttaagagttctatatgatcatgacaagaatttattttaaaattacatatgtgtatcttggagttacctgtgtaacatttctgaaatgctaggtgtgaaagatacagaggcttagagagtatggctgaagtatttcttgaaggcttcattagagatgaaaggttttttcctggtgacatggatagcgatttggggccagctcataataggtagcaagggctggctggtaaatgttcatgaatgtaaggaatggtttttatgcacagccatagccgaacattaaattatatgaacaaaattaaatgttgttttgtggtactaggattgaacccaagccatgccctatatatactaggaaaataatctattactaagctgtctcatagccctttttgaaaatttgagttttaagtagggactcaccaagttgtttgtgctggcctcatacttgtaggccagaaaggacttgaactttggccctcctgccttagcctcccaaataatgaggccatagctgtgtgataccagctaaaatgcaatgaattctaataagctcaaagccaatacatttacataaactatccataattattttaccacattttgtaattgtttatgcccttgagatccatttattgtatctatgtggtaagaaatgcaaagtgacagcatcaatgtatctcttctcagctttgcatgaggaatgccatgccagcgtcagcagtggaactcgagagtgctcatatcgataaatcacagtattgtagactgggggctgggtttattttttgcttgctttctagaccgaagaaagttatggatacaatgttagtaacgcagattaaattttaaaaatgtgttgcatatttaggtatcacattggacagaacacaaaattaggggcttgggagagtggacactactcttgcagaggacctatttgagtctcagcatccatgttgggtggcttaaaactgcctgtgattccatctcctgggtatttaaacacttcacatctccaatagcaccagcactcatgtgcacactcccatgcaccaacattcatatgcataattcgaagtaaaatcgatctaaagtcccacaaaaataagggatgcttatttaattcaacaaaaatattcacaactattctgacaccctgtcatttcattttcatctttattgttataataaagatatcagccaacattcatgctagctcattaattgcaaatataacctgagtacagttatgagttaggctaaaatccagtattctgtaagaattaattggtcctgtaagcatttatggtaaaagagttttatttcttatattgcttgctaattgagacaaacatgactgtgtatgacataggtacattggaaagagggctgatccatgtcccagctgggccagagtggaatggtgtgagacttcatgatgatagattggaattctgatatgtctctcaaattcctctttactatttttggaatgtggttgaggcattggggaatgaaactgttagacaaagaaggaatgccacatagactttgtctacaaagagttcagctggtcagcaccacctttcgcttcagggacaaaggcaacatcctcaggaagattcagctggtgcactgcaggacatgcttggtttcctttaacactgaaatacttcatagaagatgaactggagccactgggctagagctaagatctctctatggtggatgctggttgggaaatattctattctttgtggttttactaagtccatctagtcaggtttgatccagtaactctgccaattgctacacattgagaatttgcttctgcaatccattctagaatttatgttttaagttttatttctagcatgatagaaaaccatcccacaagtgatcagagtgttaaaacctaaaaactacaatgacattttttatgttaatttgaagtataacaatatggtcactggagaggggagattttgcatccagtgttttattcttttttttttttagtgaaattattttagcctttgtactaataatttaactggtccgtatatttgaagactcttagtaaccactcatatcaaagtgttaaccattcactaggcattataatttaaatattgagcctccaaagactaaatgaaaatgagtaggttcaatattaattagcaaggatcttgaggagcaattatagttgaaattcaaaaattttgaataggaattctgagtgaaatttatagcatccttatcaggctgttaattttttttgttgaaattggaatttctgaacaatcttgatggctcttatgataagtgagctcatgattcctcaagtttatgaaatagttgaggtggagagggcttggtgaaagacctaatgataattgtaccgtctggaaagatgagtgatggggagcacagaatgtgcctgccctgctcatcctttttgctttattacaaaatagaatctgaggtttagaagacagttcatgaatccttaccatgctttgctagggaagcagtgtgagcagactccctcatttagtgttaggcacttcaccaccaccgtatagttggagttgatggagattggtacctcagaatcatatgtagaagcaagacaagttgaatctgcctcatcaacaaagaaggaactgttaggtcaagcacaagattgtgtgaagaagcaaatataaaggggaaatattctggactgggtatgggtatggctggggatgtagtcacttggtagaattcttgcctattgtgcacaaagccctgggtttgatcctcagagccacatgtatcagatatggtgacacacatctgaaatctagtgttggggaggtagaggtaggaggatcagaaatacaaggtcattcttggctatataggtagtttgaggtattttatgggccatgtgacaacctgcctctaaataaaaacatgagaattaagtatttgggagggacagagatgaggactgctcccagaatctaagatgtaaggaccaatgccttttcaaggttccctactggcaggacagtcttgtagcattctgcgaagcatggatcctagcttgactgagatcgactgtctgttcagtgggctaacctcaaaaatcaaggcgttttccctacccactgtgggtcgtgttctgccaaggaaaacaagaaggtggtgctcataaagagacaaagtgttacagcatcattattggaccattgaaggaaagctagttcttcctggtcaagggaatggagtctctgtcctggttggagacctaatgttccagttgggttggtcaattacccagttaacaaactcaggatgatgggttcacctaagggcatgtggaagatgtggaagtaatagttatccctttaatgaggtaacatacttcttcttcccagaattcctgacccctctccagaggcttatagagatcagccatacagctgtcttgcttttcagaagagaaaaggtaacttttccttttcttcctcctatctcttctccaagcaagctgtcccagacactttgggcttcctcattctttctctaaagttccccccacccctaccccatgactttttccatgtgaccacctgtttgctgaacctctatctctatctccgtcttcctccttcaggcagctgccaggatttacggcttgcctgctctggagattttcttttaaactaataacacagtccttaagctttcttctgagttccttcttaatttcccaaaggggaagccagtttcccttgcagcatgtggtgatgtcccaaagtttccagttaacaaaacaatgctttagacttctgaacaatactataactgcaattcctgaccccttggttttgaagtgggaagactttccattcacttctgtgatgctcacccccccccagtacttaatccttatctgtttgtaaatctaccacatggttagctttgttaatgtaatggctagcactgggttagctagtccataaacatcaataagggatagaaacaacaaagaagcacagtcacatggtcccatgagatgcacgaactgacaggctttgaagctcagtggtttatgctacataactaaaaatgctgaaattgaggcctgaagacatagctcagtggctaaacctctccctgctcttccaaaaggtctgagtttggttccctgtacccacatcaggcagctaacaacagactgtaactccagtgccagggaatccaagtcctactggcacctgtgggcacccatactcatatagcatagattcacatacatacacacattaaaatgaaaattaatttaaacataaaataaaaaatgaaattagaagttttacaagatcaccagtaccaggtccaaatctacatgaatataatattttgtaaatgctaaacttgttgatggaagaagttgttttgctatttttatatctcaccacaaacaaagaaatctgaatagatgctcaggtaaggcttttcatggacattccttctttaagccaccaggagcatgttatgcatgcccttaggttggctttctttctttccttcttctgtatgcattattgcagtttttaatactactaatgactttgaaatgggacattgactcagaattagtgacaatcaagcgttaatggtccttgcctctgtggcccatcaggaactcatctccttcaacattagttcccaggaaataagctagatcaggctttctcaagatttggccatttagcaaagatccctgactgtcacagggagcctctcactcatctttttattgctttttctattcccatgtcttggcttgtgttttttgatcaaagagagtgacctatatcagattttatgagcaggtaaatgagagaaagaaaaaaatgaaataaatagaagatattgttcaacctgaaaccatgcaacatcataataaaaatccccaaagaacataactgttagaaatgacttaagcaattatctaattaaacctatttccagtttaaaaatgaagaaacagagtgaaggaagcaaggtaaccttcacaaagtctgtaaaagagaaaggatactcatgtgacacttgggttcttgtccgctggacagagtttgttggacctagctcacactggtgtgggcaatttgttattgaatgtcgagaatgttatgaaccggttgctaacaccagttaccactgtaaccaatgatttgtaaaccttatagttaaggtaattatattaaaaagcaaacataacatagatctaaagtttattttccaaatatttacttttcaggttacttgagcttatttgcatgcagaaaatgctactagatcagtggttctcaaccttcctaatgctgtgacctttaacacagttcctcatgtttgcagctgaaccccaaccataaaattattttgttactactactcgactgtaattttgctactgttatggactgtaatgttaatatctgtgttttccaatggtcttaggcaactcctgtgaaaagatcatttgacccccaaaggggtcatgaccaacaggttaagaaccactgcactaattgtgagtgaatatctcttcccgttttcccactgatttaagtggtagcaattgaccacatggaaattggcaaatgttaaaatcagttttcctttactctcctttccctccctgtctcccttcctccctctctccctgtctccctccctccccatctccctgtcatttgttaacttattctccagctctggttggtgtttggccaatggtgccctagaaggagtttagaaggtggacacaggagtcatggtgtttcattcacctttggggtccctttgagggatggtgtcagtttcttgctagcctttgactaatatcactgctttgccacttgctactgagttgcttacttcctgtagccaattcttttcattaaaaacaaaaagccttcagtgtcaggatgggcgccagtgagatctctcagtcaagaaatgtaaaggtgcttgtcaccaaggctgacacattgagttccatcctcaggatccacatggtagaaacagaactaactcctagaatttgtcctgttatctaaacacacacacacatatacatacccttcatgacacattcatatcccatccctacgtaaatataataaacggttacaagaaatacttggatgtcttcctttttattgtttggaccttgtttgatacacatagaaagactatttaaacttaagtatttttcttatagcattttccatactagactttacacacttacaatgatgaagctatatataatagaggcagaagtccctttctttattccagaatcacagagcccaattacagagcccaaaaggccaactgcttgtggaagtatctgtagtgtgttgttgaaaagcaacacatgagagcgataccaggatctgtgggataacagatctgcggatttgttaatattctgaacgagatacgatagaaaattcaccagacctactgaagccatccagtacatcttcaaagtctgaattttgattcgataactcatgttctgcctttgattagattttcattagttttttttttcttacggcgccatggtgactaaatgatatctataattggaaaaaatgtatagttttaaaatagtgaattgattttctgaaagtcaaattgacagtcttaaaaacctggtacctggtatacggctgctgtgcttgagctccactgatgaagctcctttagtttatcatttatgtattgatcaaaacccacatgactgtgggacacagaaggaggccgatgctgggaaagaaggttttcttcctttccttatgggtttgtataatacagagaaaatggatttcatttagggaatcagtaagtatttcatatttctcctcgtggggaagcacagatttcaaaaaatgtgctgtgatggcttagaatataaacattgctcatatagttttgtatcttatatatttccttttgtaatctgctattaaatatattatgaaagaataccgattaaatttgcctacatggatacatttacattgaccataatgattaattataaattaatgtgtgcattcacaaaatgttttaagatggtataatgatgtctgaattgatacccttgcacaaccccttattaacattaccaataaccagatatgaggtggcagaaaacgttttgtaatggcatgccagtaagacaagcaggctgtctaagaatgccatactcaattttcaccacaagatgtcgctcaatccgttatgagttaggtcttttgttaccagcagaatgacgtttccatttattttacatgctctccaattaaaactcatggtggatggattggaggagaggagaccccgactcttttcaatctgtgtgaggaaaactgatgaataatttctttagactgagaattcagacaccataaaattgttgcatccccagtttctgggttgctgtgtctacatgtccatactggccctgccagtcgcacagtttttttttttacatatagtcatcagtaccatctgccctgaaccaagtaatttcctgccgacccccactagcagcatacgcaacaacctgtttctgtaatatacaaagtgtcaaaagattgcaaacaagtcatcagatgtctgtgtttcagcagcaattaaatagtcacaacaaggcagtccggagagaaagcttccagaagtaaccgtgtgcgaaaggcaatcactggatcagggtgaggttatttattgctctagaccatgtctgtgattagaaaaagaaatccatgagttaaagattggaaatgctgcagtctcttgctttcctatcaaatttgccctaaatttaaatttagaccttgcagcttttgacatgagatggagggaaggcttcttttcttgtctcttatgaccagtgattgacctatggctgattgtaatgcagggcagcctgttactaaagatattttctggggagtggcagggccaaaatcagactggaagctggtgtgttaaatcccccaggaacattttataggaaggtacctttgccctttgcttaaattaatttggccacaaatagagctgatttggccctcaggcaggatggtttctgggatgtcaagagaaactctttggcatattaagtccttagcagtcactttcattttagtgcagtggcttctgtgatctcagtgggctgagcagagaatttcaggggatggaaccctatgctcagtgaagccaaacggagaacttgaatggctggtgatgagtagagagaaaatcagcagtagaaatgaggagggcaggaggagctaccgacaagtggcagcgaggagctggttctaggagaatccccacataatggactgttttgcctgtgaatgttcctccgggctgtatcaaattggttcaaacatttagctaaggcaattaaaaactgagtggaaggacttactctgccttcttgtttcttgtttccctttatcctggctccacacatcatgggcaaacatatcacctttctttatgaattctcactcgcctgttcattctctcagatttatctgtttaactgctattcatttttatacttcagggaagccactgtgggtttgaggatgaaaaacatttcaaaaacttgtcagataaccatggaactcttctgcagaaaaattcatcttttcctctaaaatagcttaactcaaataatggaaacgttaaacttttctattatttagtctaaacaatatttaaaaggcattggtgtttttgaccagtgattcccacactttcaggaattacccaaggatttggtccaaatggcatctagttcagtgggtccaaggtagggcctcaatgcctttctaacaagttcttgggagatgctaacccccacggaccacactgaggagccagacatccttcggcatggtttcaacgtggaaaagagaaatttctgacagtgacatagatctcttgtggttcagagagaaggagaggtattcagacaagccgttttgagagtagggcaggaactctgttgatgaggcattgttccctgtcacctgactgcgagtctccgggagcacacgtgatgtcctgtgcaccaggatgcaggttttctcctaagagaagaatcaatcatcccctgcatcactgttttgaaacatcacaactgaaatggcttttatgttgctaaaagaagaggaggaggaagaagaaaaaaaggcgcagcttttgaaggggaaaaatagttttccgataacccccattaactacaggggtcattgtggcaaaatgaatgggattagaaatctgctaaaagctgcagtatatggtacgcggtgactgacaagccttttgctgagtagttacaaatgggactaatggtttaaacttgttagtcattgtcagagcctctgatcctcgagtcagccatggaagctatggcagaaatcgataaggcgccactttctgcagtgaactgctcgaccatatagattgcctgaagggaaatgctgagttccctcccaggctgtcagatgaaagcaggcagctaaatctccaggaagattgaccacactgctccgggcaattaggcctttcaccactttgaacaccgattataaaggcatggggagggaggaggccggaagccatcttggagcctccagagcttgtggggcgtttcttccctcctgggttaagagacaagcatgttggggactgcctctggcctggccctttctctgttcccgtgtttcctctcagcagctgcaaagggaggctgggcagtcaggtagcccttggttgctgatggactgtaaccgcatctgaactccatcagtcctcctagagcagcccaggcttcccattgggcacatttcaaaacaatcaggtcccattgttcagggcctttttgggcagagccctgtgagggtgccaaaatcatcagggaaaaagaaagtgcttgttcgtgcaacaatgacagacaagctgcagattggcagcaggctgtgagcggccaagtgcaggccctgcagggctgaactcagagaggaggagcccatgggtctgatgcacagtcggatgctcggttcctgtagcccagacctgagcagaggagccttgggaggtggggaatctttgcttttccccttcctggcaaggccgagtggtggctccttggttgaagaggaactggtctcctgcttcatctgctttgcctttccactcaaactccaactgggagttcctttcggtttctgttgtcccgatgctgagtgtcaccccttggtatctaaaattttaccctcatgattgactttataatttttctcccttctcctcgccagcccaggctcctattctgttaactttaagttgcatcgtgaacctggccttctaggtggtgttttgctgtcaaaggcaagaaactgtggaatcatccctaattacagccccgtgggagggttgtcagtcccaggtctggagcacttatccctggtcagtacagctcctgagggagagtgctgaaagtctactttatgaggtttgcttggcagctggtgacaagagggatgccagaataaaatgctgaatttctttaggaaacaaagggtggttgtaggacactgtagcagcggtctcttccatggaagggacgatggtggggatttctgccattttctattgcagggaaagaggagctctgttctcacgggcagtcctaatggatcatttcttggttcatcttcaactcttaacagccatgggatatcatctattattaaggaagcctcatgtcattcattcacaggtcacaggatgggttgaccacctatgaaaacaaagggagttgtaaaatatagaacagcagaagtgagccctaatgcactttgagcttaggggtgaagatgggtcaaccgaggctgtctgctgtaacaaatgcactgtgtgagggaagccatattgctgtgtcccggcaaaagtataagggaaccctctgttacttcactttattttcctgtgaacctaaaggtgctccaaaaagtaaactctagctgggcattgtggcacacacacataattctgttgtggcataatcctctgtacactgtgaaaatgtgctgctctcattgttaataaaaagctgattggttgatagctaggcaggattttctgggcagagagaattctgggaagaagaagggtggagccaaacagaagaagcaatatgggaagttcatagatgaggtaactgagactcagggaagcacatagagtaataaaaatgggtcagtttaagtgttaagagctagctaaacacaagcctaagctatcggccgagcatttataattaatactaatgggagcaactgccagaacatagagaaaccctgtctgcattattccaacatccaggaggtagaagcaagaagatgaggatgtcaaggttagccttggctacagagtgagttcagagtcagtctatgctacataaaatcctgtctcatcctaatttcaaacaaaagaggaaagaaataggaaaactccatttaaaaaggcaagagataccctccaaacagcaattgcatcagcaacaacccccccaaaacaaataaagccaaatgaaatgggggtataaatagcccctagaccacaagtgaagtggaatgaagcaccaatttgattggagtatcctttcatgaagtaagtgaatctgaccttcaatcctcttttacggtgttaaatgagaattctttctgtaaactgagtgcattttttaggcttttggggaattgctgtggacatacttggccaccagggaatagttaggttctagaacttacagacttttgagaaaaacttattctcaggaagacagttgctataataattattctcttagctacagtttttactgacagatctactgaggatgacagtgtagaatgccgagttctacattttatctgatatgctttggttctctgcatcttagcccttcttcttttcctacaaaatagaggagagatttctttagtacttagcctcatgtgtctgtggccagcagaacaaatgtctctccaaaaggctgtattctaattcctggatttgtgactatgttgtagctataaggatggcaaagcacagatgtttatctggattatctaggtgggctcagaggtatgggtgacagctctaagttttttctttttgtttgcttgggaaagtggagaatttgactaaatgagctcagaagaaagggtatcccagaattataaggggccatagtgactgatctaattgtaatgaatgccatgattcatgtcattgtgtctttgaaaattgttctttatgactcggtagaatattggtagctctgaggcccctctacttcataagacactcccttcagcactttcacagtctgaggatggagatatagatggctcagtggttatgaggacttgttgctcttccacaggacccaggttcagttcccagcacctgtaatgagttcaggactgtcagtacctctagtttcaggggatctgacactcatctttggccttcagagaaactgcacatatgtcatgcacatagacaaacaggctgacacacacccacacccacccacccacacacacccacacaccactcacacacacacacacacaacacacacacacacacacacacacacacacacattaaaaataaaacctaaaagaagaattcttaagtttgtgtacttatgtaaaaatcatattatgttctctcaagcttcccactctgacttcttttttagtcaaaaccttaaggctcagatttcaaatgcatctactattgaagggaatagggacttttattttctgttttgtcaggggtaggggcctgctttctgaggccatgttcaggactgtagagagatgggtcaaaatattttggggaaaatgttagtgtaaattaagatagcttcaagagatgcagtggttagaggtgcttgctgccaagactgataactcaagttcagtccctggaatagacacagtggaaggagagaaccaatggaaggagagaacctctcctctaaatcatcctctgacttacacacactcactgtggcatactccccaagtaaattgtaaaatgcaattaaaaaaatagctttatgaactagtgttactagcgattttcctgctttgttcactgagcagtatataacttatggtagctactaaatatacatttgttggctcaataaacagtctaataataacatacaccagaaataagtaaattagaaattatgataaacagcttgaataataaaatttggtccatccatttgtttttttaaaaaagtcatactttaagtatagtgggagctttcccagatgttagtgtgcaagttgtataatcttcctatcatcagggactgtgctttctgatagggctgcaggcctgagaatccaagaggtcattgcctgttactgaggagaatttagaacttctctgcttaaaggcagatctaatgagtccatgtgggaagctgtaacctccccgtaacacaggatatagagggtacagtgggccttgaacaattaatcagtgttatggcataacagctcaaatatggaaattctaaaggtcctacatgttgacaaatggccaatttatgctaagatccatcaagtgtgctggggcatttggaactatcactgcacaatcatgacatggtcattattgggccgcaaatcgtccaaggaaatgacatgcctcaggaggcaagatttgcctgcagagcctgcctctttctaaactcagtgtgtggctggcttgctgtaaacgaagcaatccagcatgtagatgagctcctgtgtggcagctgcatggcggaaagcaattataacacagaggcaactctgcaagcaagaaccaggcccctgaaatatgaccacgtctacctcaccaccaacggagatgccaaactgaaatacacacatagttgtaatggagagagagaggcctgaatatataataacaaggagagggactagggatgctctcagcagcttccacggaaacttgtacttgacagaggttgtcctggaaaactcattagctccttcgaacttggagataggactcttccagggacccaggagtccactgttccctctaataatgtgcaggagagtagaacatcacacattttctttttttttgactacactagacattgacattactctcctcttagagatgtattttattagaaaagcatggaccttgggccaggaggactgatccaaaggatgccaagagtgacagatggtaggctttggctgaccaatcaggttttacaacacatagcttgatatttgaatataagatgtgcaaagcttgagcatggatggtcccttctgcacatttcctattctgcatgggcaggcatggccactctgcagagtgagaaggtgttatgttgtagaaacagaaacacagtgataagagattgtactcaaagagatggattttagcttctgatttggttccctagtttcaacctctcacaaggccctgtgataacttctattcttgaattctgtgagtcagtcacacatgggtttacaaatgccatgatttttgatttgaccaactagcagaatttgtttgggtgacttaggcttatcatcttacttaaaacagccacctttcaaaggcagacagttatttcagcttttcatgtggcgagagcctcagagaggtttgatggtatctccaaagtctcagggttggtaaatgggggaagtggtgatttctattgaagttgtatttgcattgaaattgattttacattttctgtgaagtcattaaaccacctactatatagtaaatgatttatgctataatttgagaacagaatctatgttgaattactgaatcaacttgagaatatgactagaaaccaaatcatctttatttaaacagctaacactacttacgtttacttgagttgaaacttacacatgccctgaggaaaaataatcttatacatagctgtttccctgaggtgatgaggactaaggatttaagaagtattgcctagagttaccgtcatcctgagaagtttgtaacttaaaattagctcttcattatcataggtgagatgggtaattccatttggagggtaaaaccagtccttaccacaaagagaatcaaagtatcctgctcgtaggtaagtgaatctctattttgggtaggggagatagaagtgatttttcctattccctcaaccagtaagcaacacatggcaatgcctgaagtcatattaagtaccgacccttggagaggagaagatgctgctgacttttgatggggacaagggatatatgctgcaatgcacaggacaacaccaccatgacagaggacagtcagccaggcttcaaaatgctacgagtgccgagattaagaatcattcatatgtcctctaggactagcacactgtctaaaatcttattttaaatatagcattgacttgagacttttggataggccaccaccatttatagatgcaatactttactttggagtaatatgtacctgtggattatcatccattacaataacagcaaaaattttcatcaaattgcctggacagccactgagaccccagagaagtgaatgtgacttattacataggaggttccaacactgagactaaagtcagaggaagaatgaacccaggagaaacctgtgggaggcaaaaccaccatttcctttatgcactaaaaaaatgacttagcactaacaaaaagagagaaatactacccaagtgctcaagaactggatagcacatattaaaattttatgtgaaacctatgatttactaatgttgaaagaatggttaaagaaaacatgttcaagagaggaaatattgccccccaaatcttatcatggaataatgtctctcctcctggtgtgctttccatttccaaatacatgagggaatttagttgttcccaattagttggaatctgaggctttgcagttgcatagacaacacagtgccacctctctatttaatcaaaactagagctgattttgtagcttagactctcagaccattagaacatcattttagttcaggtgaatgaatacagatatattacttaggttgtgtcatacatagtttctaccacctggggtttacattacatatgcaatgaacacacactaatattgttatgtgcctcacttccaatcctcctttgcgttggggttggggcagaattcaccattatgttgagaagcagaattctggtttctatcaaaaaagctgagtgatttctggctaccttttcctgtcccagagcaaggcacaggggacctaataatcaatgggatgttctccacttgggttctgtaaggttgggagcttgggagtcagagtaggagctgtgtgggtcttttggttaacacttggaaaagagcttcctgcaagaatttcatggcccacatagattatgtggagctagcaagaaggtagtacttgttactgcaacttagccatgtctatcctgactagtgcattgatagaaagatatttatcaaacaagttcttaaaaaataaaaataaaaaactacctgggaaggaagggtggggaagaatggaacagaaattttatagccccacagagctgcttggagcttcgcttctgtcagttgctgtctatgactttagggttagttgaaggcaagcatggactaagatctggcgatttttcttcattcacactagaaagaagcttcaatagattgagaagccacagtgacccattgtaacatattcacagagacaaatacctcatctcattttaatttccttagttctcactgaaaagtatcaactgtctttttcatccatactaatctctcacgaatctagataaaagcctttcaaaaatatacatgactcatcctgccttgataaaccaaaatcccatgctttgtctgcagatgacagctaaaattctatagcctctatggtgacagtgaaccctctcttgcccatcaacaactggctctccttggtggtttttagttggttgttcagatataagcatttttgcctgttggccactcgttttctctcttcaaagcactgtgctggaaactcagtggtatgtgacctgaaacaagcctctcacagacactattcctttgtgccaaagagctccctctaatctaatgtccaatcttccaataattatcacattttctttccctgctgagcactctgaagcatttttgctaagtagcctcggaagcacagtggaaatagtcgtggtctctggtggtcagatttgcaaatttatcccaaaccatcataaaaccagtgcaagtgcttcacatatgcaaaaagccttctgctatgccagacaggtaagtgggttattctgggtgcccttttttgccattagtcttactgcaatgggattgtggggcactgaactagaactcccaacagctccaattgctgcctgctgcctcaatgaattttatattagcaggcaaatgaaacagtcaaccaagtgaaaggaattcataatgctgaggcttcttcagactggaatgtgctgtacgttttgcaaaaaaggatggtggttatcaatgtgcaatgactaatctagataaatcgccactttacgacacatctggtctcaagtcctttaaattagtggagttcagctgtagaacactggctgaactggagaatacaaattcatatgcttcctacacatgcataaatgctaactgatgagcttggtaatggccaggagtctcattgctgggagactgataagctagtacagggtttctttgctgaacattaattaagtcagtgcaataaagcttcagaagtactagtttctaagcaagatagtttgaattaatgtttatgaaagctctttattagccagaagatgatcttcaaaggtaatatgggaaaagctttttccctcttaatttagaatcttagtaaatagcacaaatcttccattttatacttatggccatgacaggagcctcagaatcataatttagccagtttgcttgccattatcttctttcatgtctcccttaaacaaggataaagggttagaaatggtgtgtgtatgtgtgtgtgtgtgtgtgtgtgtgtgtgtgtgtgtgtgtgtgtgtgtgtgtgtgtgttgtttcatccccagggagttatgtttagtagatcttagaggttagatttggctaataaggtctaataatccaagcaccagatcctgtcaaattagaaaccaaggcaccatttaatattaatcaagccagtacaatgacgtttattcaaaatagttgtggatcctgaggctgttatgagtcagagcgggagcagcccaggtggtaatgatggcatcatattctgaacttcctggcttgatcttagggccttattgtattcaattctcagggcagtcttttaagagcagcagcaagaacagtttcatggaaacagggctgtgacaatgagtgatgctaagtcatgccaagaaccacttgatccatctctctgcactcaggagaaatgtgagatactttttggatatagggaataaggtcatgtgggagcttgtctagaagagtaaaggatggtctgagaagcccccaaacttatgtgtagagtttctgcatatgagaataattacacttttaggagggcaggtttatagaattaaccaaaatctcaaaggacaaaggctatgtgtggctcaacatgtccgaccactaaccaatagttttgaattacaagaagaaaaaatatccagttctcaaggaagagtgctctacgatttggagttgcctccatatggcttggtctgcctccaggtaaagagagtttctcaccgcttgacacttccaactcccgaactaataaagggtggtagggaggagattggttcatcagaccagggtaggattaaactccttctgtggctcatgccaattttaaatttccaggatcctccacacacagatcaaacagcacctacaagtcccacactttgtttgttggttagatccaatagatattttcttcttttccattgttcttctgttgttgattcctctctgcttaaaatgagcacatttagatcaaaatccctcagtaaaggtcactcatataattctcatagtaagatttagttttggtgttaattttagtatttcctgtatgaaaactaaaatgtataaggatactaaattaggaaaccttatgcttcactgttgcttatgcaacagaactctacttggctgagaaattgtacttccagtaaacttagtcatatagatttatttcagaattatgaagcaccacacacacacacacacacacacacacacacacacacacacacacacacactttttttcaatgctgaggctctaggaccttgctcctatgaggccaacacaccaccactgagctatatctttagctctgactatgtatttataattatctatgttatacacattatttcacactaggtatagatattagtggatatctacttagcatccactctcaaacctagtgctttacagttatatcatttgaactttactacattcaatgaagacattatttttgttatttttattttactaatatgacaattaagtatacagaagtttcaagacaaataaccaaaagggttaggatttgaacatagatatttgactccagaacatatgaaatcaggcatcccatgtttgctaagtggcagctttgcttagatcatgatgcttttagcatcaggactgttgtatggactggtgtcagactggctgttagttttgtgatatattgaacgggctagagtaaaccacacattctggaatcatctgtgtacatcactgggtacatcaaagtcatgagaaacaaagaaccttgtgaagattttggagtgaggaagtggaatgtcagacacactaaagatcacaggtggaatcaatttctgccaactcatcctgtccttagctggattgaattgatgtactctcccttagatattccttcacctttgtgaacttctggatgagtgtgtgtgtgtatgtgtgctcgtgtgcatgcatgtaagtttcactctgaaagaaactctattcacccctccctagcattcaaggttaatataagaatgaaaacgagctttaaagtacttatactatccatgagggattccacctttccctgccttcaggaaattctgaggttgccgacctcttactaattttactttcagatttcagtgctatttcagaggacaactgatatgggatgtccttctgtatcctgtggaatatgtgttgcttttattggttgataaataaagctgatttgttcagtggtcaagcagaatatagctaggtgggaaatccaaatagagatttaaaaaaagaaggcagagttagacagatgccatgtagccaccaaagaggtaagatgccagagcattactagcaagccatggccatgtgatgataaacagattattaaaaatggattaatttataagagagagagctagccagtaataagcctgagccattggctaaacaattatattcacttttagcctctgagtgattatttcataagtggccgtggggacccatgagtgggagaggaaccagtctaggggaccagtgggacagagaaaagcattcaactatagacaatggctttacagagtggatttaaccagcattcagagttgatagagtcaaattgctgtggcagacttgtccctagtcaacccaacctgcttctgtcaatcaggggtcatacttgctcatatcttctgccgatgttctgatcaaaccaactgacacagcacattggggtatgacattgatttgtggattggagtgatgagagtataaacagaaatgaacatttcaattcgtaggaggcagtctcaggatagcagagtgagactacagggtttgaatggctttcagggccttttgtaatatatgctgggtgatactggcaagctatttatcttctctggacttatgacttggcctgctagaatggatactatcattgtttactttatgtggtgtgtgatgtgtttagaacagggtaaactttgcattgctgtttgctattatagttatccttgtgaatccacagaggattggttcagggctgtgcacagacttgaaaatccatggatgttcaaatttcttatacaaaaatggcatattatctgaatataatctccacttatccttctatatcctttaaatcatttctaggtcacttatatcacttaatgcaacataaatgctgtacaaataatagttttataaattgaatttttaagggacttatagcaagaaaaatagactgtacaattcaatatagacgggaaccttgtagaactaactatacaatacccaaagggcatgtaatgtaacaatgtccaaatagggaatattagaaagaagagtccatgaaatggtgggaactacacagggaatgctcatatggcttcatttatatggattcaacaccacaatatttagtgtgtggaaatttgcattttgctttttgcaaatttctagaacttgtgccacaaatgttttaatctagagattgattgtggagatatagaacccaaagatgaggaaggctggagctttctgtattttgctccccacaccccagaacacattggtcagtggctgatggattctattgatttggaacttgaaaatatggagggctgaatattttgtgattagtgttagttgttagaggagaagggcaaattctatctctgtgttcctaaagtgtttcaattgtggctagtttcgttgggattgaaaatatgtgcttcaagcccttgagagactcttagcttttcctgtcccatctctgctccttgactctgtcttgtatctctttaaatgatacccccccaccaccaacaaccagagataagagagggaaacagatggatgaggaagagaacaaaaatccggaagaaacttgggcaaatagtttccattagcctctctttttatatcaatctagagagaataggggagatggcaaaagaggaaaagcataatggtttggattaagtggagcttttatgtgcaccagtctttccgagcagctggggtccaggcagactctgtgtgccctgtactcaggtgcagggaaagcaggtagaatggtggtggaaagcaagtgtccttcttatcccactattgagctcttctgatactccttttaaaaacaagtgctttgtcccacacgcactgtagtccatttttctctggaaaggctcaccttttctggctccccaagataggagaagccttttgagcacagctgcttatttgggttgatacaggggcccagacagacatttattcattccttttcgaggctgcgcttgtcatccctctgaggttacttcttgccaaagtggctgctgtctggcaaccacatgggccgagatggtcaagtttcaaatgtcaccatgcaaattgcagttttaaaccaaaaccaaggcttgaaatgccagaccttaaatgtccctcaaatacatgttttcccagctatgaacttgccacagaaataaacaaccgttatgcagaaaccaccctccccgtctttcccattctctacccagtaccaaaactatttcatggagtgtttgtgatagaaagatgtctcagtgtggcccacttagcactttgaagcatagaaatgaaagacggtggggcacatatgccagggaaccacagaatgacagagtcatcactgtcccagttttctgagtcacggtgacagacacaaggggattgattttaaaactgctgataacacatcaggaagacagcagagcatggcccttctttagaaaggagacttaaagaatcttcccttatgattcacaaaggagcttgggattcaggccttgtttttgtgtcttaagaaaaatggaagcaaatgacagggtccatgcagaagaccaagagtcacacctcacccaggagactgtagatgctccagtaggcagatggaatatgattttgttgtccatggtttggggtgtggtgtcagttactacaagggagactttaccaccaagtaatgagccatagataaagatgtcactatttagtctactgtaatttagtttcttcaccctgaacagcaaatgagtgaagctaactaaagcagaaggctgaaatcattgtcttctgagggtccccagaagaattttcatagcatcatttgatcacaggacccagttgtttgtttttttcacttctgcagttactcatctgtctctgcatccaggaggagtcaggaagaaaaaaagagtgaactcttcatgaacaaggccagcttttaatgattcttagagaagagcaaatgtctcacaggctgctgatgttttgactgtttgtcccttggagaaagcaagtagtttgtgtttgaacttaccaggtgaagataaggaacaaaaggacctgctatgactcagattcttccgttgaagcaatcaaatcaacaaacagaaaataaatctgtaccaaatgtcctctctgagtcactgcattagtgaattctccaggaagaaccccactgggatgatttcttcctaccaaaccccatttcctgtagctgcttagactgtgtactaggttgaagtcagcagactgcagcaggctcattagtggcaacagtttgaatttccgtgcaacatggagtcagtggctttaagaagtaaaaatatgggtctctccataaaatccaaatttccagtaaacagtgaatacttttttgatacaaccatgtctcaaatattgcagggatcatatttatattaaaatattcacattttaaattgaaatgctaagaatattaattgttttcctgaaacaattttaattgggatccagctgactgtgggaaggtggagacacatataaacagctgaaagatgataatacaagcaaggataaataccacaaaaagatcattttgacttattttggtcaaaaataaggcctggtaagagattggacagcagaggagaaatagacatttttttttgaggaaactaagagcaaagttgagccctggaagggccttaggagttacatagatgaagaattggaggaagcatcctccatgactggtaagattgtccagaggataaaagcacagggtgcaggtctgacaaagttgagttgaatccctgggattcacatggtgggaggagagaattgactccaaaaatttgcctatgacctccacaatacatatcccccatatgcacaataaatttaaaaagaaatttaagagtggttttgatatagtagtttatttgaatatctcaaggtaaaaagttacttccttactctagagttattgtaaaacgaagtagaggtttacaatatagaaaattgaggatagcaaaacgaatgaggggctagatcttccagcactagaaggaggtgagaatttgtattttgactggagaacaatggaagccaacattaggatcatgggagctttgtatccaatttccatggcagagtcctactatggctgcagattgaataaagaaagagaagggaggctagatctaagtcaggtgaccagttttgaagactttcattcattcatccaaaatgattctgaggataattgggaaaagatgatagatgtagaaactgtatgtgtgtgtgtttgtgtgtgtgtgtgtgtttacacaactaccttttgaagatgtagaataggctgtagtggaagcataaatgtggtgatttggggttgagagagaggtcaatatcttgggaaacaggaatggaagaagaactaagttgtatgagactgagaagtgatgaaggttgagaagtcatcatcttattttagaatttccacatagcaaaaactagggctatgaaaattatggcagggcatttcatgttgatgaaagctccactcttctttttcttctcatagcagctcaagagaagaggggactatattctccccctaaaaagtaaggaacagacatctcttgtgtctttgtctagatgtgataatgtgatcatgactgcatcatcactagtagccagggctcagtaagattggtttaagcctgaactttgtagtttggtattcaatcttgtgagttggaggtgtttatatgcttaaaagttttagtttaccaatagaagatgcttattgggatggaaactaaaattctatgagaatttgtacaaagagttgttggagaatagagtagggaatagatgattattcttggtagaatacaatggaagcatttacagagacaggggacttcagtgcaactttagtttcctgaatagcaaaatatcatacacggacttaaacaacagaaacttatttctcacagttccaaaggatgggaaatctaagaccaaagtgcaagttgatttagtttatgatgtggtgaggttctcttcctaacttacagacagctgccttccccaggtgttctcataggtctttgccttggttcattactccctcaatgagacactctctcttcctcttactaagagggtattgggatcccatctttatgacctcatctaagggtatgccctcctaaaattcctatctccaaatacatttgttcacattgaggattagggcttcaatatgtgagtggcgctggaggatcagcaatcactatggcagagtgagaccctgaatcatgaaggagtatttccaggtggagaacaagggggtgggggaagggagagcagctgcatatggggagtgcacgaagggaaagccggtacagagatggtgactgacgtgtacataacttgttatatgtcgagaagtgatgggtgatgacactaaaaactgaatctgttaggatgtgaaggagcatggatgctcacctggtatgcaataaggaaagcaccacagtgcaaagcactgaaaagcagccagagattccacacaggtggtctagacatacatgcagaaatcacaaggtgagtgagatttttcacaatatttgcaattattcagccatattattaccatcaacttgcacagattgcatgcttcaagtaaaaaacaaagtctaaatccaccctgagcacaggaaaaaagctgttccccaagaggaattgtgggtttcctcagctgtatttacatctaccctctgagaatttctggattgatttcatagtcacaccggggtatctgtggcttgaattcagtgtgtgagagagaactggtgtccaactctataacctttatttgtgcctgattctttatgcaatgaggggaaagtaagttgaagaaagactttgaagaattcagttagttaattttagtggacttggattaaggctgaggaaaaatattttaagcctttaaatggtaagctgtctaaacagctttagtatacattccttggttttagaaaattattcagtaaagagttctgagaaatctatactatgtcccatgtgatggttaatgttatttgtcaatttgacagcatctagaaaaatctaggataagtctgggcatgcaaatgcaaacatatagattattttattttaaatggaaaatctcaccctaaatttggctgttacaattctgagggggtaggattcccttggagaatgtgatctgagtaacagcattcatccctctggccttcctgactacagttgcaatgggactagccagtctcctacgcctgccacaggacttccatgcttccatatcttcctggcagtgatgtaagaaccttcttgaattgtaagctagagcaaccaatcccagtgttagcttcttattgtcagggtttgttcacaaaaatgggaaacgtaactaatttagttgtctactgcatactctaactatcacccttgtggaatatttattaggatggctagatattgggaagacccttctctaccacatgttgtcagcgagggagggatatggctatagcagtggccataaaaaagcattgtgtttgcttccatgattgtagagtcttggaggttgttcatctctagaaaaccaagatagtatattaaatttggttgtcattgccctgagcactgtctattaaaatgtagaggactttggttaacattattcctgaaactttgttttaagttctggctgagtgtcagcatgtccaagatttgtagcccattttggattgattttcttctattctccatccttaggaatcaatgctttctgaaatctttcatttcttgcactctgaaaatcaccagggttcatactagttcttcatgtttggtgaccccctaaccataaaattatttttgttgctaccttataattgtaattttgctattatgagttgtaaatatctatgttttctgatggtcttaggtggggacacaacccacaggttgacaaacactgtcataatgggttccattgcctcaactgattatattaaaacagagcatggagataacagcagaaatagtgtatttagttttcctttttgttcatgacaagtttttattgtcaggcaaaggatacctttttgataaatctttcatatatgccaggaaacaaaatgccttggatgggttggttttagtaacttcttcatttctgtgatgaactactctgacagaagcgacttagatgaaagatttattttgctttattttgccttacaactgctgaggatacagtgcatcatggtgggatatacatggcagctttcaagataggcatggtggaaagagcctatcttggtgatcacgtgatgtgcataggaagccagcagcaactgggaagtaggactggactgtaaaccctcagggcttaccccggtgactctccttcagtgaggttctgcctcctaaaggttccaaaaccggcactaatctggacagcaagtgttcaaacaagtgagtctatggggtactttccacaatcaaaccacaaatttccatctctggcttccataggcttgtggccatctcctgttacataatgtattcatgtccattgctttgggcatttcttacagtgttcaaaagtccaaagcctaaagtcatttctgagatctaaggcagtcccttaactgtgagctcttacaaaaataaaaagcaagttacttatttccagcatataatggcacagagtaaaacattccaaaagagaagcatgaaccaaagcaagactgacacacccagcatggcgaacatgaaatactatatccatgtttcatatttgggacttgtgatggaatcatttcagatacaaagggcttagagagtccttatccatctctgagacctgtagatcacataagatctctctttggttctgtctactctatgcagttttcttaattaaaatcccctggtctggccttttgaacactccagaatctctttggtgaaggaggttctaccttcacaacttcatgaagtgtcctctcaaggcctctttggagggactccaacccctgtcactcattgcttagtatcagcagctcttgaaatgttggtggaagaatccacagttgcttcaagcttgcatctttcatgcctccatatcaaagatcatgtggacagcagtgtggatttctgttggccagataaagatgtagcctgggcccctaggagcccagttgcattaacttcttgtgtgctgaccctggggaaacacttccagggttgctttccaggaacaagaaactagtttggcattctgagcctaggctctttcattggaaatgaatttgcctgttcacaagttgaagcctttgacaggtgggtctagctcttaggacacctttcttattgtcccaatacacaacagaaagtttctctttaatagactgaatctctttaagattacaatgctttgagatctcattacaacttcaagcttactcacacaactttcctcactaaacttcacatttttagtttatttttgctatatatattgctctttctcaatgtagatcagaatgagaacattgagcaaaaaccagagcacagcctcagtgttgtcctgacttgtctagggatgagaggctcatgagctccccacctctacctggagagctattgacagttgatagcttctaggagaggaagagtctatctatctatctatctatctatctatctatctatctatctatctatctttttaatgctgtggcagctgataggttgatcatgttccagagtgtggacccacaaattggattaggtaagacattaaaaaaatagaggatttaaaatgtagaaggggtaggttagatcttggagaagttaaggaaagtagaaggaatgaatatacattgtatgcatatgaaattctcaaagaaattaataacaatactatacgttgttgaaagatttcccccccaaaacaaacaaacaaacaaacaaacaaattaagccatcatttttttacttagcttcactcaactttttgagacacaggccgaatacaaccagactcttagaatatatccggaatggcctccaccccagctccagatagagtccatgttgttctttaaaaacttatgagtatccacaattttctttgccttccattcttttaaaatcctatctgaagagctcatgacagtctgcctacaaaatctgagggcttttccagcctacagttccaaactttgccatatacttcccaccaacctgctccaaaggcttaaggaccatgtggtcaggtttatcacaaaaatgactctgcttcacagtacatatttcctctcacagttactgtctcattactgtgatgtaattatcagacagagaggatgggttgactgggtacagtgccacatttaatgacatcactagggaggcagaggcagacagatacaagtccaaggccagcaagtgccaggccaattagggccacacagtgaaacactgtctccaaatgatggagggagagaggaaggggagagggagagaggaaaagagaaaggagggttattttggcttacaactttagagtgatagagtctataaaggtggggagaacatggcaaccagaagggaagacatgatggcagggtggtaggagcagacgcctgggtggtcacattgtattcatactcaggaagcaggcaccacacaggaagttgttccaggctgtaactcctcagccctgccccctttcccagtaaggccctacctcttacagattctacagctttcccaaatggtatcatcactgaggaatcagttcaaggaatcaaacccatggaggacttttcttattcaaattatagcagaggccattcatcttattaaaaaaaaaaagtctagaagttggacaagaaacataagaaaagaacgtcgtacttaaaactccaaactcttaacttcaagtcgaccttgtttcctagttacataatgatggaccatccttgaactctttggcactccatgtcatcactcataaaactgtgacctcattatcataagagcataataaagaccataagaaagcatgtgtggtgttgacatgcttcaggagcccagtgcttcctagcatgtgcccagtctggtccttagtaccacaaacagcaaagaaactgaaaaataatatcccttttttcaaagtagaagggcactcagtgggtggtaggaggaaatggaaaaggagggaggaaggggaatcaatttgccacttaatgtagccaactttcagcctaataaagtagaaagaaaaacatagtagacgtatgccaaattcacatttctctaaggggagctgtgtttttacccttagtttgatgccagcgtggttaatgctttttctgaacagttatgcagctataggcacttaagtattcaagagggcaatatgtgaaaatgactctcaatcaagattaaggcagtaagtaatttttgattgtacaatcattcgggtaacttggatggaaatacctggccattttgtgacctcagtttctgaatctgtaactggggagcagaaggctgacctgcccccagaatgtgctgcaagcattaattacctgcgtgtgattgaagagcatcctcaaggcgagccctgaaatgccaagtgttcttgctgataataaagcagatactttcttgatggagttgtcatgaggattaatgatttaattgcatcaaagtgctctgatattcttagatgaaaagcaccatataactttgaagaggaatattattaagtagctcttgctttgtttccccaaagagtagcttcaaggcaggcaatgctgatcctgcacgtgcctagccagacgcttccatctctcaacacggcaggaacctggtgctccagaggaagcctgttacagggtgattaagaatttctcatatttcttctgtagttggctcatggggtcagttggagatgcagctttcacagttgtcaacaaataagataactgggaattaaccagtgcaaatgcttttctatgagtgagaacaaagtctggttcaggtgtttacacaaatccaccagtccaagtggccgccatctaatactccagtcacactggcttctgttcaatttcttctactttctgaactctattttgcttttgacatctgtggtgtcattcttagcttttcaaagacctgggcacagcactcctttccttccaaatatcagtttatttgctttgcttcagaggtcactctcttatgaccccccccactttcccacagatgtttatttctgccacaccaacctttctgtgtgccattagtatttattaggaaatcggtttatcttttaattgactagcttaattacatgttgtttgctccatgctactgaaatgtaaatgtagagtgatgtagacttttatctgtttcaccctctgcatttcagctgtggctgactatagcagctatttgaagaatgcattgtttatgttttttttttttttttgtgtgtgtgtccaccaaaattgcttagtggtgcatcagtaaattaggttatcttcaaaacatctgtaacacagactgtgctggctagttttatgtcaacttgacataagctagaatcaccagagagtagggagcttcaaaagagaaaatgcctccagaagatccagctgtaggcaagcctgtatagcattttcttaattagtaatttatgggggagatcccagaccattatgggtggtccaaccccctgggctggttggtgttcttgggttctgtaagaaagcaggctgagcaatccacaaggagcaagcctgtaagcagcactcttattagcatgtgcatcagcttcttcctccaggtttctgccccatttgagttcctgttctgacctcctcccatgatagatgacaatttggaagtgtaaggcaaatcaactctttctttccaaacttgcttttggtcatggtgcttcattgaagcaatagaaaccctagctaagacagccttgaatggaagttggaaacttttgaagttttacaaaaaacttctaatgatcaaactggttagctgcaaaaatggaagataaagaagctaacaatgagaaatgtagaagtactttggcctgaactataaggctattatcattggcatttttcttttctacacatttaactttggaatcatattctctggaactctccgtttatttttacctttcaccaaaggggatggggtgggggagatatataatccatgcttggacaggagacggtctacaaactaaccaggccccaatttgtgaattagttgggagaatgtggagacagaacagagagaaaatccagactgcttaatgtctgcagaatttgttaattgtaacaccaacagcagttgtgtatctgtaatacaagcattggttgggctgggaacacacaagggggatgatgtcttattcttgtagcaaactgagaagcaagaactattatctcagttttacagataaatgctcagtgctccagaggactgcagcaactttctcagggtccctttggtgctaagaagtggcctagaattagaattcatgtcggtttctgccttcccaggagggcagcagttagagataaggggctgtgcattaaatacaggaaaagcggagcttcagctcagaggcaaagtgatttcgcagggcttccctgcagaatgaccccacaccaggtgcttgtgtctgggtgctgcagcccagagccccccagagctgctgtgactcacagtgggaagtgggaacctggactccaagcatttccctaagtgtaaggtgtgcactgatagaaagaaccagaacagtgacgtgctttctctggaccctgtcttgttattttgaaatgcctgcagaagttggctaccagaaagcaagttttttaaggtgaatcactttctttgcaatgacagcttttgagaaaagtctccttttaaacattccatgactttggtcaaagagcggggccctgctatcaaagatttcggcactgtcagaagcatcagccaatcagagtgtcctcgtcatgctcactgccacttgctcaatatttcttgtgtttcctgcttttactctgacagtttctaagtctcgggggaccagagaatttttctttatctttttatttcctctgcaagttacacacacacacacacacacacacacacacacacacacacacactcttataaatcacacacacacacacatatttatttatggggaaactgctgagtggggctacctagaggaagtagaggagcacagactttaaaataaaaagaagaaaaaagcctgaatatttttttgtaccagttttgttactctttatgaactcttaaacaaaaatattggcaatttgttcagtctttccctctttgctaatatttaaaagtattcaattaagattttctaatgtgtccattgagttaagctgtcctatactattagaaaaatattacacgtataaataaaatacgctaaagcattaaaaagctattacacacactgaacataaagtggcagaataatgatggatcccaccatgcaggaaacatattcaaaaatattatcttcctggtaatgaaatgccatccgtttcattttaagctaaatatgttagacatatcagtggagtctgtgctgacacagcagtgagttgaaattgaaaatctgaaattatatatatgattggacacagtgttaaagtaatttataggaaaaaccacgaatgtgctgggtctgcaccttctggtgaactcattttatagaatcagatagaggaaaactctaccatttctaatgcgcagttagaatggcagcccgccagggccccaatatattcggtttaaaaagaggacagacagagacaggggctaggggagggagaggccaggaaggggagggcagcaagggaaagagaggtggcagggtgggccatggagacagggaaaagctgggccagagaggcttgcttcaaattactgcaattctgcataagccatcaagaaaatggcattggctttcattgccctgacctaatgggagatagcataggagctgcattagtgatcaggacaaatgggagataataggaaacctgggagggggctggcttcagccagcgtgctgctgggtgcttggtgactccactcactgtggtgccagtcaagctctggtggaggtcatttgaccccaggaagttcaggtagacccatagagtgctgaggggaaaagatgagatgatgaccagctcaggtcgccagtctgtctgcctgcttgtctgtttctctgtcctcctttagctttctcagcactgtacacatttgtctacaaaatacagtgggaagcagggtgggccaaagatgaggagagaaataggactgagcctttgtgtggaaatgtgtgacgaattggtaccctgatgtggttttcgtctttcatttatagccataatcctgcttgaaacgtggattatttgcattcatattgagctggttccctctggaaccctggtgagccactgctgtgatttccatttggtaactgcttggtcagagacagggatggccttgtgtctcctttaatgtcctttgcaaccttcagcttctcaagagaaaaaggaggtgaccatgaaagaaagaaggaaggacactttgatcttgtcatggatatatagcccaggattcctggtaacctcaaataggatagatataaacacaaaaccttctctgtgtcttgtctgtctgtctcttcaaaatgcctgggcttttaaatgcgtagacaagagctataatggatgtggagtttttttctttctaaatattcaggttgttttctacatggatgccagttactacatgatctcatagcatgatgacaaaggtacccagtgtgcttaccagtttgggggtgaggaaactgagggtgaaagaggtcagatgaccttcctcaaagttacaaagacaaaaaatacccccgttacaaactctatattcttcaaagtcattgtgtggcaagaattttctgctccatttaacagcaatcactgtggatggatggaggggttaaatagcttgccctgggtcttagccatctctgaaccctccaagtagctcatcttcctcctgtattctgtgattttcctcctagcactcactaaagtggtattatttttatgtgtgcagattcctgcctgtattgggcactaagctcaagaatgcagcaactgcatcctgtttcctcactattgtatccctaggtacaggacaggtccaagtgctcaatagtgattgattggataaatgtatgattggaaggtgcattttcactgctagtctgtagaataactggcactgcaaactccctccctcccttctttttctttctctttctctttcttccttgtctttattgtctcagtggtcctctctgaaaaggaatgacagtcattttacagatttcaacatcacagaaaagggagactgctatctacaattctacctcatggttaacaacttgtatccataaggggtttgctttgatgggtcctgagactggatacttactgtgtcactggcccctcccactgccctatagaggtggttttgtgtgtgtggggaatacagcttagaaagcaggtgtaattttagagcccccatcatcctagccttgccttctctagacctaggcacatatagcatctctcaactccactgacagtcctccagatgtgttaaagcatctgttaggttccacacatgcttctcttttccaacttttcaaaccattttcttatggatatgggactgactcaatttggtcatcctgaaaggctgacctttaaaatgtttgatgcaattaaaacattaaatacttcattctatatgtaattgaagtattctatcattcagcctttctgtcatttgaaaattgaaatgtggtaagtcttactatgtatttttacacatggaccataatatttagctgtattaaatttgtgaccagctaaaacttctttagtttgttgatatatatatatatatatatatatgtatatatatataatatatatatatatatatcaacaaactaatgaatgacagggtttctctgtgtgacagcacttactttcctggagctcattttgtagaccaggctggctttgaactcagttctgcctgcctttgcctctccagttctgggattaaaggtatacaccatcatgcctggcttcaacaaacatttcttaagccaatactatatgctcaccatcaggtagtcttgggtataaagtgaaaggagccttgactcctgcttccagctgagtgccttctaaggtactagagaaggcataaaaactaatactaaaaagaagaccaagagagggtaaattagattatgaagaaggatggaggcgggcaaaaggacacacgggacatgaaagagtgatgctagaagggggcagtggtagcaagggggtggtggaaatctgctaaaacacactttgaagatgtatgagactacccaatgtcttgcatgctaatttaaaagagttaacagttataggattcttcaatcctgtcacttatattcagtgttatagcatgtgactcagcatttcattttatatgccattaatagatagatcattatgtttttaaaaccctttttttaaaaaaatttattttgttagcatatattaactgtataaagtaatgggttccattatgacattttcatataaatatgtaatatacattgatcatagtcacactctgtgtgcacgtatgtgttgcttgtgtgtctctacacatgtgtgtatagatccatatgtgtgcctgtgcatgtacaagtcccaggttgacttcctcagttgctcgctacctcacctattgatgtgtggggtctgtggctgaacacatagcttaccatttcagctagtctggcaagccagctcattccagggaacctgcccaaccccagcgctggtttggcattgcaaaagacttccatgccatctggcttttttcaggtggggtaccggagatctgaactctagccctcatgcatgcacaccaagcactttgtctcctagccatctcaacagcccacatccttattctctattactctcctatttcccttctcttttctccattcccattaaatctccaatgaaccttttactttcatgcatttccctcttaaattcaatatatgagagaaaacatatgtctttctggatctggcttattctgcttaacaaaggttccattccatccatttctgaagaatgacataatttgttcttttttttttttttaaatgtctgtgttttcctaactgagggaccacagtgattgtcatatgaaggtgttgtataatggaatgatgttctctccacttgatggacagaaatgtttttaagtctgtttagataacccatgtcttgatactcctgtggtaagacacttaccaactaaaaggccaggcgactgctgggctaagcagagaatctgggtggttattttctgtgtgagcatgtagggaaaaattcaacctcattgcttagaaaaagcttcctgatgacatctgcttccccaactaataatgattgattattctttatcacaaatgcaagagagacacattgttttctatgggttgtaaggaaacaatctggaaaggtcttggaatggagcttgagagaacagtagacctttgagaaagatggaagggagggcactgcaggcaaggggaagtagtgtgaacaaagacctggaactggtgaccaaatgcaagatgcttggtttgtgtagagcttagtgtttgaagtgagcacggtagctatgaacatgtgaaaaagagcagagtgtctacagtcctgctcatgcatcagtgagtaagagtcaagagtgattgagctcagaaacatttgggtttcatgctagaatatatggccacatagatcagctggtcctctctttaatctcagtgtcagcttgttacatataaatataaataagattaccaatgttctcctttattaaaaactgagatgccatgagtggggaatgagtaagcaaaggaaatcaccatgtgaagaatgttgattctgactcctgaagtaccaggctctcaccattctacaacaggtaaagattaaggctttgcttttgggctgtacccattttcatgacgccattctcaagaggttttctccaactaagccattgttaaataacacttttactctaatgagctttgtttaattgtttgcttattggtgtgtgtgtgtgtgtctacctgtctgtctgtctgtctgtctgtctgtctgtctgtctgtgtgcttgaggtgaggttgcagtagtagcctaggctagcctttaactcaccatgttcatgtgtcagtaactcttctgagttgtggaattatagtgtgtgacaatgtggtcagattttcttaatgttttgatattaaaagtcatatatgttttttcatgcttatacaaatcattcataccaaatttcagaaaagatgatgaacagaagtatgacacactcagtgagagatgagcacaatgcttggaacattctcatgtactgcaaagacaccatcatggtgtcataaaaatgaaatgtattaaaaacaagcttctacatatcttctagatattagatattaagaaataagcaaagtcaatgtaacttaaaattatataagggcatatattaattttcaagctatatggcttgaaattataaggtaaacattttgattccataaaattttttttctctagtctggcccctcattcttccactcatatcaatttcctttcacacaaactccatagcctatttcctctctctctctctctctctctctctctctctctctctctctctctctctctctctgtgtgtgtgtgtcttcatgtatgagctttgatgaaatattttcactggcccttggttgtcaaggaagcaattcagcattccaggagaccagagaggatgacctgtcatggaaaacagaattcattccattttagctctgctttttttctactgaagtaaccagtatctgacatcaatatgctgtctataggactgggtcccctccatgtccttatcttgaagagttatccctagtatgactatatcagagaggtaatggcagttaaattaagctataagtgtggaccactaatcctatatgactgaagtcctcattaagaagtgagacagatcaggaatgtgtgtgcacagagaaaaatacaatttgggatctaatgagaagatgtccatctagagaccaagtagagcagtctcaggagagatcaaagctgtctaacttaatcttggactttgagactccagatatgtgagaaaacatttttgttgctcaagtcacccagtcagtagtgatttcccatggtagctgtgtagagcagaacatcatactacttttaaaggtatacatgccacactatgtccatctaggaaactaatcttgcctttagtatggtcatttgagaagaaaagtcaccatttaagagactacactatttttaattttatttatgcatatgtcacatgtatgggggtacctaggaagatcagaagagggtatcagatcctgtggaactgaagatacaggtggtttttggccatccattacaggtgctgggagctgaactcaggttctctgaagagcagtaagtgttcttaactgctgatctatctctccagctcctgggttacattatgttacagagatatcttaaaggacaatacattgcaatttgaaaatggtcccttcagaaatacacacacacacacacacacacacacacacacacacacacacacggatatttgcattttgtatattcaatagcttggtccacagggaagaattgttcctctcttcattttagcatttcatatttagtgtggcattaatcagagtccttttttttttctagttagcagttgccaacagaaagatccttgttgggtgtcttgatacatttgtgttttgcaaatcactccaaaatgatcaccttattctactttccatgacaacatcctcttatagagaggtctcatagacagaagggttcagtcttcatttctggttttcagaaattcacatactgttgggttacagacttcagccagcactgtagactcctccacagggtcctttaggcttccttgttatcctcaagcatagacatgcagttctttatctcctagacacagctcaccattgttttttgtactaccagatagtaagtctgccattaccgccataatacagacttagcaagttagaataacgcccattgactatctcagtttccctgacccataaagtgttgacagggttgctaaccattctggacactttcagaatgagactctttctgagcttattgaagttattgtccaaagttattccctctggttgttgggatggggtctctttccttgatgctctttgtggtttcttgctttccatgtaggtcccttctatcagcgatggatatgagacagggcaggaagatagaaaaattctggggatatgggaagagaaataatacctcactccagagtctagttgaagcctttttgcagctgagaattaagaattcctgtaaaattaagtgtttgcagtgagagctcccaacacagaggcggtatttcttttacatagagatattttcaaacaacattaaaatagggccaaagaagtagttcacttgactatatgcttgccacataagcctgaggaacttagtttggatttctagcatctatgaaaaaggagggtgtggtgatagcatatgtctgtaatcacattgttggggtgtagaaacaggaggatccctggagcccaaatggttagccaggctagcttgtgagtgctgactgtctcaaaaactatgatggagagggactgaggaagacatctgacgtggacctctgaacctctgatctacacacacacacacacacacacacactgtggtagtttgaaagaaaatggaccccaaagggagtgtcactattaggagttgtggttttattggaacaggtatggttttgaaggaggaagtgtgtcattgtggaggtgggctttaaggtgtcatatacgctcaagtcatacccagtatcagagaccatttcctgttgcctgcaagatgtaggactctcagatacttgggatcacacacctttaatcccagcacctgtgttatataaggtaagagcagatattcagtctgaggcattttggtctccagccacaagtagtctttagccacatagagaacagttttgcttcagcttgggtagaggtaagagctactagtttggccactttgcttatctgaccattggcttgaaccccaatatctatctctgggtttttattttttgtgttacacctaaccaactacccaaggctagatcaccaatcttggaggagaatctatgattgacactttattaaaccaacataatccctaactgcattctaaatatttgtccttatacatacttttagggatagattccccttttggttcacctaatttacatgccttggggataagtgtagtcctcatccctcattgaagaaaacttctccttgcaatagagggacggcattatagaaaaccacgtacatacacataagtaacaacaactagtgagaaaaggtcataaggacaaagaaaggaataggggagaattttccaagtggaatgaatgggaaggaagaaatgaattataatatcaaaataagtaataattaaaaacctatacatcgctgtgtgataaatatagcctctggttttgttttgttttttgataaagtttccttatgtagttggggctgaactggaactcccaggaattctccatccacccaagtgtcctagggtgggatttcaaccatgttttaccatgcctaactaacctgcatttaagtcacagtaaggttattttgctctttggagctgcacacattcaattcatgtaattgattgcatgtgtgcacacataagcaattagcaatattgagtgaatagggatgtgccgatgtctttccaacctcatcctatcaaagccctcgatgttttccctctctattcagtgcccctactaagtccctgagaggccattttccaaaaacagacctgagttatcagccccacatggaggagatatgtcatctgagatccacagtagctgcaatactctccatatttatctggtccccagctcttgtctttgagatccttctccagggctacctccttacagagtttccctacatctctccttaggttttcaggaagccatctgaaggccttcctctgtacccagcacttgaattcagtccattttagaaggtggccaggccattgtaatgtgtatcatcaatcaagagctaatgcattggatgggagatgatcaagaaaggacctcttaagcagtgtcagatcctgttattaaaataaaaggaaggtggagactaaggcaatcccaatccgagacaccatcttgacaagggtgaggagtatttcttctttgagcatgctattattgtgatgcttctggaaagatcctggggtgtaacaaatgaacagaacaggaaagaaggcagattgtggagggggaagaaggaacaaggggaattcattgtcactaagacacaaggcataactgataggaaaagtaacagctcaggagccccaagaccaagttctcagcacagaggagattaatttgcctcagagggatggagggcagggaataagagacaaagtcaggagatagaggatgagggagaagggggagggaacaggggaaaggggacagaagatatttgtctcagaggacaaaacattacctctagagaggagacagatgtggcacttggggaaaatgtaagtttataaaggtgcaaagaatacctttgttttaggataaagtgtttacttttcattgggcatgttaattaggtgaaccaaaaggggattttgactgctggacttcaatacttttgataactggactttgtagtcagtctgaggatgaggaagttgccaaataagagaacagaccttggtgattagttttaggaatgtaatctaaaggcctttagcaaggcagagggaatgcgagcaaaggggcaaggcctgccagcgccatgcttgtcacacttcagctgggcagtattccttcaataacaagaaaacaaactgcctaatttctgactagatgtttgctttactggacaaacttgaatcaggtaaaacagttaatttggaattttaaagtgtgtgactttttattgcaaaggtaaatggcacacaccacagccaagattctttaatggcatcgccatgtggaattcagatggatggggtactcgatcctataagggagctgcttgttgttcactaaatagtcatctgtttctcagtctcagttcctcctccataggtgggaccttgactaagttctgactcttagctaagtgtaagagaccttttacttctgcccctagccactgaaggtgtggcataagacttggctccctctcccaggcatcatgttgggacagggaaacatccatttgtctacatctcaggtgaccatgtgaagcaaagccagctttcccaccattgcccatgtggacaatgcctgagtgagaaatagatatttgttcattcactgtggtttagtttagcacagaacacttagcttcccctgaagaacccagttcttatttggtataagagaaaatagaaatcatggggaaaaaaggacaatatgctttgatgaaatgatattgaattttacagcgtctctaaataagttcttggcaagaatcaaataattttagagcaggaatacagttgttaagaggaattatgataaaagagatcggacacttagctgtgcctctttaacaaccatttccatctccctacaaagaggaaggagatattaaagtctatcgtggggtaattcacacgtctgctaggaactcaagcatctgtagggcccttgattcaatcactaagtatattcattaagtgcctactgtgtgcagatcgatgaagcaggtattatgggaagatataaaaacatcatgaggcataatatccctaaatctcaagtattattcagttcagaaggaaaactgctttggtgtcaggaaagaggatgtaactgggtatatgttaaaagatattgattttaaagtcagatttttaaatgcttagaggacgtaagaagcaaaaacaaaatggtaagtataaagaaaggctgaaataggaataactgacattgggaactttcaaaaaccttcacaagttaagacttgtgttatagacgtgtctataaactttacataagtatatacttaacatgatcacagatttgcaacatgatttgttgatagattttgaaaatgggggaaaccaatttattctttattttagtatgagcatggggatgtaggttaaggtgttgtgcatagtaggtaagcattctacaaatgagctttatcttctacaccatactgtgtagacagtgccttataatttcttacctgtgacattgcaaagcacaccaatagcattgtttggattttctcccccaaaatgtgatgaggaaatgagaaaaaaattagtgtaattcttctaaaggaattcttcctacattttgatgactgaaaatgaagcaccccttaattgtttatcatactcattttgcaatatcagtttaagacaaggagtaggtgattaaagtacacagtcttggtgctggtcatgcattattgcattacattgaatttaaatacgaacttagtgttgaagattctgccattatgtttagagtacttgaagtgtattgcttgtcaaagggtgttctatacaacttagaggaaaacatgagctacatggctggcaagcaatctccaggctgttctgctatccatggaagatcatttctctgtgacaagtgaaacacaggtgtgattattccttccacagggtagctagagaacatacacatttagccacttggaaaaaatgagtcatgtatgagcatggaccctgtcccaggcactgataataatatcagagaaaggctttccagatacccagattcttttgcagaagagggtttagacattgaatactgtgtcctaactgcacagaacctcacagttttatgcttaatctaccagctttgagagtgcagggcattgtctacatgcaataatgctgaacttcaggaaaaaagatgttgtgttggcaacctgaagaaacagtgcatagcagaagaggcttaaaaaacatagactcctgtatcctggtgaatggagtttatgatatctgttcccagtggctgtatggtgccctggtttctgactaagttgcaatgaggaacaaagtgatggacaggcagatgatagctcaccaacagcctaagaaacaggttggaatttctcaaacaccagctgtctgtcttccctagtgaagaccatccctttgaatataatttattcagggactattgcttcttaagtcagagtatattagacacatctaacattacttggatcacagaatgaggagacaaaatgaaaagatttccccagtggcttacaatgggcgtggtctaaggaactaactcctggaatctattggtgcaaacaaacagcattcttgctgcctgagccagagttcatcacttcatgaactttcttctagttcactccattgtagaacctattacttattcttgctggaaagtggttagccatatatgagaataccacaaatgaactgaagaaagtcaacagagtggttttaatagtagactacatcagacagacagaatggctggtgaacttgaagctaggtcattgtaaatcatgcactttgaagagttcaaagcaaagaaaacccagggtagtttgagggccttatggtatactaccaaatataacatgctaattactaatgtttcagaaatagggtaggaggccaggaagaggagaaagaatgtatttgaagaaacaatggcagaagaattcctaaggttgagggagtaaataaaattccagactcaagaatttccaatggcatcaaataagaggaacttacaaggacacacacacactatcatcaccatcaaatagttaaaggttagagagttttgaaaacaagatgaaattaattctcacacacaaaatacctaaaattatcagtagatttttcagtagaagccttgcatgcaactaagaattgccatggtgtcttcaacaccctgaaaggaaaaaaaaattgtcaaacaagaataatatacccaggaactttgtcttttaaaaaatgaagtgtgataaagactatcttaggcaaaaaactgagagatacaacattactagacttgccttacaagatatcttaaagggagttttaaagtcaaggaaagagcatataaattattaacatgcaaacatgagagtatagaatttgccagtaaaattaagtacattgtcaaattcaaaatgcttcagtattagcagtgagtagccaataacatctatagtataaaaattaaaaggcagggccggagagattacttcgtaaagtgcttgcttagaaagagtgatgaccatgggatccccagaaaccatgtagaacagctgggcctaatggtggacatttgtaatttcagccctggaaaggcagagataagcagatgcctgggcccattggccagccagcctagccaaccagggaagcccagctctcattatgtatgcatacttgtattataattcagcatttccatttaggcatttgttcaaaagtagtgcacgcatacatatatcaaatggtatctaaaatgtttgtaagagcattattagtaaatgccaccaagtgaaaaggatctaaatagccatacacagtgaggtgcatttatttttagatgcagcaattacatagtgtcatatagatggtctgtgatttacagtgctgtgacttaacattttttcaaatttatgatagcaataagcaattcatgttcagtaggaagtgcttgaatttgggttatttcttgggtagtgacagggtgtgatgtttgctgatgatgcctggcagcatcggtcagccataattcagagtcagcctcacaattaatatcaaacaactggtgcatcagcatgtgctcttagatgatcataatcaatagcttaagtaaatcaaagcatttcaacttaggttatcttttacttacattgagcttatttgtatgccacccaagcataagagattcaggatatttgtattacatggcaatgaacaaaatactggcataggtaacagccccacaaatgacaagaagataattatgacaaaataagccatactttttaaatgcatacagtatttcaggtatataaacttacaaaaactaggcaaaactaatttatgattatttagattgtattaagtctttctctgtcacaccaggcagctcccaaatcctgaacatggagacatattattattattattattgttgttgttgttgttgttgttttcaagacaggatttctctgtattgctttggagcctgtcctggaactcactctgtagaccaggctgtccttgaactcacagagatcagcctgcctctgcctcccaagtactggagttaaaggtatgtgttatcaatgccttccctagagacttattattaattctgaatgcttggccaatagcttaggctcttttcactagcttttataacttaacccatttctactcatctatatgttgcagcctgacttgtgatttttacctcttctccagcatgtctgttccccctgggtccacttgtgactcctcccttcttcccagcattgtttgtgcttagaaatcctgcctaactactgactggtcagctttttattaaacaaatcacagtgacacatcttcacacagtgtaaatgaatattccacaacataacttggaggttacttttggggagaagtattaggaaacggcatagagagggctgagaatctcagaggtactgtctttaaatttttttattaattaaatttattcatttattttacatcctgaccacagttcccctccccacaccctttcattctccctctctcaccttctcccccaatccactcctcttctgtttgtgttcagaaaggggtaggccttccatgggtgtccacaaaacatggcatatcaagttgaggtaggactaagctcctccccttgtatttagctgggcaaggcaacccaatatgagaaataggttcctggaagccagctaacgcattaggaaaaggccctgcttctacctctaggagtcccacaagtagattaagctatagaactgtcacacatatgtagagggcctaggtttgccccatgcaggcttcctagttgtaagtccagtgtctttgaactcctatgagcccgggtttgttgtttctaactgttcccctgtgatgagcttgaatccctggcttgtataatccttcctaactctcttcaaaaggattctccaagtttagccaagtgcttggttatgatctctgcatctgtttccatcagtcactcaataaaggctctctgatggatgacagttagggtagttaccaatcttattagaggagatgaccagttcaggctacctgtctattattgctaggagtcttagctggtgtcatccttgtagattaatgggaatttccactggagcaggtttctacctgatctcaaaatgcccccctccatcaagacatctctttaattgcttttcctcctccacccactctccctgtaacccaatcactcagttcccatccccactggcccccagtctacccaggagagctcttctacttcctcttctcagggaaatccatgcgttcctgttcctgtcctgctttgggccctccttgtttcctagcctctctggggctatggattgtagcctgattatccttcactttacagctaatacgcacttatgattgagtacatactatgtttgtccttcagcttctgggacacttcactcaaggtgattttttttttctagttccatctgtttgcctttaaatttcctgatgtcactttcttccccaagagatttttttttttattagttcaaattagaaacaaagctgcttcattgtttttagcagcacattccattttctttatccattccttgattgaggggcatctaggttgttttcaggttgtggctattaagaataatgctgctatgaacatagttgagtaagtgtccttttggaatgatggagcatcctttgagtatatgcccaagagtggtatagctaggtcttgaggtagatcgattcccaatttcctgagaaactgccatattgacttccaaagttcttgtacaagttttccactcccaccagcagtggaggattgttccccttgcccaaaatcctctccagcgtaagctgtcattagtgctgttactgtcttaaatgttgaccaaggaggtgattacacgagtacgactgttttgttatgtttgttgaacagtatgcttatggtatgtggatttacaaatttatgaacttgtactttgaaaactacatcaagaatgaaggattataaaaggcatttcaggggctaggcagatggatgagtagttaagcacacttactgtgcccaaatgaggacctgagttcaattctccagcacacacattaaaagatctggctgtgtgcatgtctataatctcagcactgtgggaggcagaaacaagagaatcacttgaacttgctgtcattcagccaagctctgaattcagtgagagaccctatccgaaaggaataaggtgagagtaatagagcaggtctctaacacacacacacacacacacacacacacacacacacacagcacacacagagtagatggaggttctgttctgccaggtcccacagtcctttagccccaaatacatacacagtggcttctattgtaaactatttggcctattgctcaggctccttattgactagcttgctcttaattattaacccatttctcttgaactatgtatttccacattgtcttggcttaccagtgatgtccatccctcttgctccctcagcagcaatgtggcatttccctggtcactcctctctccttccttcttccagaattctcctagtcttgtagccctacctatactttctgcctggctactggcctatcagctattattcatcaaccaataagagaaacacatattcatagcatacagaagaacattcccccatcacacatagtctctctctctcttctctctccctccctcctctcctctcccctccctccctccctccctccctccctcctccctccgtccccgctctctcaccctctttctcagtctctctcatatacacacaaagagagtgagagagcccaagagatattcctcccttcctccctcccttcctccttcgccctctccctgcttccccgcctctctccctgcctccctgccactctccattcttccccccctgcccagttctcagtagctaacaattgccaatagtttattggcaaagggtaagacttcatgctcaactctcccttctatgttgggatttcatctggcttaggctcggcaggtcttgtgcatactctcaaaattgtgagtttatatggacagctgcatcttcagaagacattatttccttgcagttatctatcgcctctgtcacttacactttctgccccatcttctgcagtgatccctgagacttgggaggaagtgatgatgatgacgatgaggtgtgtgtgttccctttaggaatgaacattctgaagtctcttattcttttattcttggccaggtgtgtgtctctacattaatcaccatctacttcaaaaagattttcttatgagagttgaaaaatgcactcatctactgattgattttaatcaccacttaaatttttcatatgtatgaaaatgactacttgtatggaaatgagaggatataccaacttttgttttcaaaagcatatataaatgcgaatctgtttatttttaggtagaatatgtagacattcacaagaacatgtttcataaagaaaaagaaaaacaccaaaatggtgacagtgtattggagggctttgctgtttaaattctgtccacattttagaaatttacaacatgtctgtcatgaacaacaatatatttttaagtgctgatttcctctattttcatagtaaataataaaatgttaaagatagtatttaaaatgagactccataatctgaataacctaatgccattattatacttttttataatactgctctcctcacatttcccaattgcatagataaggacagaaatgctatgatcgtatctctaagtctctgagtaatgcattaataaaatagaaagtgcaaggtgtaaaagggcatataatcagagtatttgtacgtaatacagtttcctacaaattgctgtgtcttctgtctttcaggatgtatcagcctcatttctaatggccacaccatattgtcagagttgttcttggcagtactgagttgtcttgaatgtttgttgatactgctgcagtgagtacgctagcctcacatcatcttgcactgtgctgtggctgtggtgtcatttctgtgatgtggaacctcttgcctgcagcacctgtctacttctgtgtcgagttgtctatttatgcaaatggatatagacactcactcttcttgatgaatcggaaacaccttttgtaaggtgttgcttttcactcaagaaccaaaagaagcattaaaccagaaatcatcagctttgcttataatgaacgcctattaactacacattcccccaatgtttgaaatcatcagtcagaaagcatcatttaacatacagaacattcatacttccactgtatgagtcaacattttaaggaaagaaggcatataactccgaggtgacaagaggctttcatggtcttactgcctctgacctctccactgtatccttaaatcctctgtgtagatcacagctttgtcttatagctttcttgaacccttttctgttttcagaaaactgtaggcttgcatcgttagtgtcattgaaatagttcttctagactttcctaaatatacagcctccatgtcaatcctgctaaaagagccatctgaaaatacttctgtggtaacattagcattttacattgtttacatttggtttgttctcttcccactacaggaatcagggacttgactttggcatttggtaaagactcccaaaacaggcagtgaaaactgaagctggcccacattcaagtgtaaaccacattgtatttgatggtgaaggagaagcccattaacctccaaacatgccacatttgggaacctaaaacttcctataccaaagccaaagacatagtgtaaaagttctgataatgttcctggagcacagaaagaaaggaatgcaaatgcctttcgaggatatattccctagtgcaggtcacagctctacccatccccaaccaattcacttaaagtaatactttgctttaatacttaaaagtatttaagagcagtgcaccattagaatggttagaaaacaagcttgctaaactctatagaaaaacagtagttagaagttatagaatcttttatatggacacgcacgcatgcacgcacgcacacacgcacgcacgcacgcacgcatggtctgttcaggacatagaacaagcaaaatgaagccaagctgcattaattgatcttcctagtgctatgacaatgtatctgagaaaacaactcaaggaagtatgggtttgttgtgtgatggacttttcttggggagatgcagcacttaacatcttcccactacagactgggagctcatggcagctaaaagtaacaacagcaccaatgtccaacttggtgactgatggagctttcactgggattgtttacaggagtctgggtgagggattacttacagggaacagggatgactcaaaagcagctgcaacacccaagtgctctgctcagcatgggtgcccactcatggaagctgcaaccctagaagagctcttgacacatctggcaaggagctcaacagtgggatgacctcttctttctgacatttggctgctcagggtctctttccctacgagctgtttactccatatttataccgctggggagggtcctgcaacagtctttccagtttctgttcttccagatgtgtgaccttttgtttgctccctgagcttcctgacaccccccccccccccgcactaggaaatcctttgagtcacaggaacctgctatacaaaaaggtttattttaactctcagtgccagtctccattccatcatagcagggaaatcatgatggcaggtgtgtgggcagctaaaagaagcccagggaagagtgctatccaaattcatagtgggttttcttatccaaatgaacccaatctaactccttcactgacatgcccagtgctttctctcttagttgattctagatcctgccaagctattaaccattgtgcaaggcaaataggaagagaaaaaccttagaaaattaaaacttagtggtaaagtaaatatccatttagatacagatgaagagaaaattcctaactagaagatgcatagaagaaaatgccaaatcttcagcatatgagatggagagactggaaagaagcaagaactgattattcctgctaaatattcttaaatgagtctgagaaaatgttggaaaaatcaggagagaaactgaatatatttttatttgagagtttcatatatatatattatatatataatatatatatatatttatctctgcccctccctcatccctccagcatctcctaaacttcctctactgtgcccctcccaatagatttaaaaaagcaaactgatggtttaattaaaattcctcttcattgctgttcttttgagcatatgattgcataatgcttcctagagagcaccatttgaaccacatatagattccactaacctggtatgggaaggcaactcagccaccccatgactggaaaagcttatctcagctggtttataatccattcattaagtggttgctttctagtaacacttctgacaccaactatttcacttgatgacagtaaaggaagacaaagaaataaaaatctgattattcaacagaaggcatagaagaacaaaacatggaaacaaccacaagggaattcaagtaatcctagaataacactgtgagaaggtgtgcattttagcagtttaaattagactaacgttgagaaaatcaaaatgcagtaactcaagagagcaaagagacagctgcaggagaagatcctttatggctgtccgtttgacagagggttgatagacagaatttacagtgacctcagaaatctcaatgtaatagcatttacaactggaccacttatcaataggtacttctcaaaagaaaaaaatacagttggccatattaaacactatacacacacacacacacacacacacacacaattagccatcagtaaaatgaaaatcagaaccatgatatttgaccccagttgcagtggctattataaacaacaatgacaataacaacaagaatcaaatgctggtgttgtagaaagaaaggaagcctggtagcccattgttgagaatgtaaatggtacattcacaatggaaaacagtatggagttttcttaaaattaaaaatagaacaactatatacagctgttatgaaaggcacacgaaggaaattaagcattcattcaaaggaaagatccatacacccatatttattttggaattttggtgaatatttaagatgtagaagaatcaagctggacatagtggcacacaagtttggtcacagcattaggaggcagtgacagatgaatttttgaattcacggtcagtctggtctacagagtgaattccagaacagccagggctacacagagaattcctgtctcaaaaacaaacaacaggtaaaacaaaaaacaaaagcatatagaatctgtctaccagtctacatgaccattaacaattatttaaaaaagtggtgtgtgtgtatgtgtgtgtgtgtgtgtacatgtgcatatttatatagctagaaagaatgagtcttatataactaaatggatgaagtcaggggcaccatgttaagtggaaaaaaaacatatgcacacaactaagtgttgtatattgttccttatacatgtaaactaaaaaaaaaaaccttcttgaaaaaatactagtacctatgagggactggaggtggtagaagaaagatgaatggatacgatcaatgcacactattcatattttgaaacatagtgcatctcactatataaaattaatatatgtaaataaaacaaagggactgaagtttgagagtagagggtgtgtggggaagtaatatattcatgcaatgttgactagaagaaaactactaaagctatgtgtatctcattactgtgtgatgatcagtgcataatgaaataattcacctggaagccataacaatttagttcatgtaaatacttcaaaacacaacctcagtatataacgtacacaaggacagaatctcataaaagttctgtctcagcagttgatagattaagctcacagaaattagtaagaaaggatagagcaaggtaattacaagatcagtcacacagacacatatagaatttcattctcagaacacgtaacaaagctaagtattaaccagaagttaggaactggcagcggggctcagttggtaaagtgactgctcagaatgcacaaagctcagagtctgatccccagcagcacgttagctgggcatagaggcataaaaatgtaatcctcgcacttgggaggtagaggaagagcagactgataaacatcaatgttctgtaagaaaaaaagcttaggtacaaaaaacaaaacaaaacaaaacaaaaaaaaaacaacaaaaaaaaaacccagcttcttatttctcagcctcagctcagaaggtagaagctaatggataatgcttaaaaattctaaatttttttctcagccaatttgcactcacatattgcttcttgaatctgttggaggaagtaatttacaaagcaaggactaaagaaagagatgaggccaaaggatacaggccatggactgccatcatggtacagagagaagtgagggaggtggtctggtgtggtcgtgaagacaaatcccactgttagctgtgcaccatgcagtccaggcaaatggagactggaggatggcaagggtaggaaggtgttgggaatgtcaagtctatggaacatgtgaacatcttcaaattaggttttagatgctgaagggttgggttttgaatatgtctcagtctcatataaaaggtagcaaataaaaaaaagacagagcacactgaaaaaaactatagccagtcaaggcaaagtgctcatagtttatttcattgttcaggcatgtgtagtgtttctatagctgtagtataaaagcatggaatttaagtaaaatgtgtgtgtaactttttgggcattgtagatggaagacagagaataacggcacaatggggtctaggacccaaaggtgctcacacagtagaaatgtagtgtaagattgaaactgaaaaagcaatgagtagcaaagcaagtttttattttattcagaaatacagaaacaagccttgaaaaatgagttaaaatagaaatgtattgtcttagtagaagagcaaatggcagagagaagcctgctgtgtttcaccacaaacagagcaatgggactctttaggatgtgctcatctgtaatttcaatagaaacagattctgtctgagaacaaaagccagtataatttgccttatcaacaactttgaagataaagaaagaaaaaaaaagactgaactaattaatgtaaggcatttaattcagtttagtatttacccgtgataacatttcttagcaagtgttcttaacctggtaagtgataatttaaaaagcaataattattatattcaatagggacatgacagaataaaaataaagaccacccccagttttcctcagcagagttcaggatatccttgctaccaggttaggataaaatttggggacaggaaaggaagagagactagttatttatacataataacactgttaacatggaaagatccatagaaatctaacactgatttgaactggtcagggaattcagcaagactgctgaacaaaatgtctacctatacacatgagcagtgtctctctgtggaaggaatacacatatggcatttaaaatctcaaaaacagtacacccctttgagatacccaggaatgaatatgcaaagaagctaaagaaacttacagcaagctttataaccttattgaagaacatacaagaagacttaaaatggaatgggcagatgtatcatgttactggatgggagaaatgacattaccaagtgtcttaggtaaggtttctattattgtgacaaacaccagggtcaaaagcaatttggggagaaagtggttcatttcattttgcaacttgaaatcatccaggaaattcaggcagaaacctggaggcaggagctgatgtagaagccatggagaaatgctgctgatttgcttgctcctcctggctcgctcagcctgctttcttatagaacccaggaccactggtccagaggtggcccatatacaattgactaggtcctcccacatcaatctctaattaagaaaatgccccacaggcttgcctacagcccaatcttatggagtcactttccaaattgaggttctcccctctctaatgattctagcttgagtcaagttgacttaaaaactagctgacacaccatgtcaatcaataacttactttaaataccagtttaaatactttcaatacttttattttattttaaataccagttcctatgtacaaattatactactatcatagatttttttccctgtaattgaagctgatcttaaaaatggatatggcagattaaagagaagaactgtggcacctttaaacaaaaatattaggaacataaactactaattggtacttaaataaactaggccttaatgttttggatgcaatgggaaaaaatcacaaaggtcaatggttatttactgggaggtttgctaggcaggtgacattggccatgtggtggaggcatttcttactgtcaaaagttgggagatgttgctattgacatctagaagccagggatgcagctatacattctaggatgtatcatacagactcttacaaagtaaagaattgcctgccttgggggaaacctgataatggccctttagagatgtttctatcctaatttgtggaatctatcaatgttactttttattttttatttttttaaaaagctgaaggtcattaccaggagttcgtctctgttgtctgagtttgatgtaagaagcttcagagaagccctgcatttcatatctagcactgaaaataaaaccaaggaagacttggcttaaaaaattttaaatgaatagctggtcaaccagaggtagcaaacttatgacatcatgctcaaataaggtggaagcctgatgcagctggtccaaggacaacttcactttgctcagactctggcgtattttaactgaagttttctgtggctaaaggaactttgaagatctgagtagttaaaggaatttgagatggagacagtgttctggtcttgtgggccatgggaggtaggatccttataggaaggatatgagagggtaaaggaagaaagaagataggaggatgcaacagagaatcagatcatatgagaggccataagccaaggcacatgggctatgtctagaaaccacaggagtttcacatgtattctttcctcggtcttctgagtgttagccatagtcacaccatgtaaagcttctctactttggctaaacaatgacaattcctgaaatgaaactaacttgtttttctagatatgctctttctgcttcatcagttccagtaaaggctgaagaagttcccaccattttaaatcactgtcttagttactgtatttatttatttatttttatttatttcactacaacaaaacaccatgaccaaggcaactcagaaatgtttaattgggtttgcttacagtttcagaggtttagtttatgatcattatgacaaggagtgtgttggcaggcaggcaggaatgtcactgcaacagtagctgcacaggcagaagacagagtagaaatcacaaagcctattcccccagtgacacacatccaacatggccacatctaatccttccttaacagtacaccaactgggaactaaacattcaaatatatgagcctatggggactattctcattcaaacaacctcacccaccctacatgttgcctccatagtcacttttcttttattagttcaaattaggaacaagcttgtttcacatgtcaatcccttctccttccccctcccctcaccccccatccctcctcccccaccctggacctacccccaacctacccccaaccccatccaccctccactccccaggcagggtatgggcctccgcaaagtccaccacatcatcctgggataggcctgggccctttcccatgtgtccagggcaagagtgcatcccttcacgtgggatgggctctcaaagtcccttcttacaccagggaaaaatactaacccactaccaggtgccccctggagtgcagaggacttctcactgacatctatgttcaggggtctggatcagtcctgtactggcctcccagacagcatctggggtagatgtgctcccccttgttcaggccagctgtttctgtgggtttctccaacctggtaccaaccccttcgatcttcattcctccctctcttcaactaagttccagagttcagttcagtgtatatctgtggatgtctgtctctgcttccatcagccactagttgagggctctaggatggcataaaaagtagtcatcaatctcattttaggggaagggtgtttaggttatcctctccaccattgcctggattgtcaattcgtgtcatccttgtaggtctctggaaatctccctagtgccagatctctccttggacctatagtggctccctctaatatggtatctcgcatcctgttctctctcctctattcttctcccaactcaatatttctgctcctccatttcctctcctccactcttctcctgctctcattctggcagctccctctcccctaccctcatgttccaaattagctcaggagttcctgccccttcccattcctggggtccattcatttatcccttagagtacttcatgtttcctagtttctttggtgaagaggattataggctggtaatcctttgctctatgactaaaattcatatatgagtgagtacacacaatgtttgtctttttgtgactgagttacctcattcaggatggtttattctagttccatccatttgcctgcgaatttcaagattccattgcctttttctgctgagtagtactccattgtataattgtaccacattttctctatccattcttcagttgaggggcatctaggttgcttccaggttctggctattacaaacaacgctgctatgaacatggttgaacatatatccttgttgtatgaatgtgcattatttgggtatatacccaagagaggaatggctgaatcttgaggtagactgattcccatttttctgagcaaccgccatactgatttccagagtggtcttacaagtttgtattcccaccagcaatggaggagtgttcctttttctccacatcctctccagcatagattgtcattggtatttttaattttagccattctgacaggtgtgaagtagtatttcagaattgttttgagatgcatttctctgatggccaaggattttgaacactttttaaagtgtttttcagccatttcagattcctctgttgagaattctctatttagttctgcacctcactttttaatttcattgtttggtgttttggtggctagcttcttgagatccttgtatattttggaaatcagccctctgtcagatgtggggtcagtgaagatcttttcccattctgtgggtggtcattttgtcttactgactgtgtcctttgccttacagaagcttctcagtttcaggaagtcccatttattaactgcagacctcagtgtctgtgctactggcgtgatgttcaggaagcggtctcctgtgccaatttattcaagggtaactcccactttctcttctagaagattcagtgtggctggatttatggtgagatctttgatccatttgcacctaagttttgtgcatggtgacaggtatagatctatctgcaatcttctgcatgtccgaatccagttgtgccagcaccatttgttgaagatgctatcttttttacattgtatagatttagcatctttgtcaaaaataaggtgttcgtaggtgtgtgggttaatatcagggttttcaattcgatccattggtctatctgtctatttttgtgccaataccaagctgttttcagaactatggctctatattggagcttgaagttagggatgatgatgcctccagaacatcctttattgtacagagttgttttggctatcctgggttttttatttttccatataatgttgagtattttatttcaatgtctgtgaagaactgtgttgggatttcgatggggattgcattgaatctgtagattacttttgacaagattaccatttttactatgttgattctatgtatccaagatcatgggagatctttccattttctggtatcttctttaatttctttctttaaagtctcaaagttcttattgtacaggtctttcacttttttggttagtgttaccccaagatattttatgttgcttgtggatattgtgaagggtgatgcttccctgatttctctatcattggatttatcatctgtaaatagcagggctactgattttttttagttaatcttgtatcctgctaccttgctgaaggtgtttatcagctgtaggagttccctggtagagttttttgggtcactaatgtagactatcatatcatctgcaaatggtgaaagtttgacttcttcctttccaatttgtatccctttgatccccctttcttgtcttattgctctagctagaacttcaagtacaatattgaagagatatggagagagtggacagccttgtcttgttcctgattttagaggaatcgatttgggtttctctccattgattttgatgttggctattggtttggtgtatattgcatttatatatgtttagatatgtttagatatgttcctgttattactgttctcaccaagatctttatcatgaagggatgttggattttgtcaaaggctttttcagcatctaatgagatgatcatgtggtttttctttttcagtttgtttatatggtggattacattggtggattttcatatgttgaaccatccttgcatccctgggatgaagcctacttgatcatggtggatgatttttctgatgtgttcttggattcgattcaccaatattttattgagtaattttgcatcgatgttcatgaaggatattggtctgtagttctctttcttagttgtatctttgtgtggcttgggtatcaaagtgattgtagtctcataaaaagagtttggcaatgtcccttatgttctattgtgtggaatagtttgaggagtactggtattacctcttgtttgaatttctggtagaattctgcagtgaagccatctggccctgggatttttttggttgggaggcttttgatgactgtttctatttcattaggggttataggtagatttaaactgcttatctgttcttggtttaattttggtaagtgatatctatccagaaagctgtccatttactttagattttcgaattttgtggagtataggttttcaagtatgacctgaagattctctagattccctcagtgtccattgttatatccccccttttcatttctgattttgttaattagcatgtgctctctctgccttttggttagtttggatagaggtttgtctatcttgttgatcttctcaaagaaccaactctttgtttcattgattctttgcaatgttttcctagtttatactttattgatttcagctctcggtttgattatttcctggcatctactcctccttagagagtttgcttctttttgctctaaagttttcagttgttctgtcaattctctagtgtgacttttctccagtttcttcatgtgggtacttagtgctttgaacttccctcttagcactgctttcatagtgttccataagattaggtatgttgtgtctacattctcattaaattataggaagtcttaaatttctttttttatttcttcctctatccaggaatggtgcaattgggtgttattcaatttcctcaaatatgtaggttttctgcaattgctgttgaattctagcttctctgtagtcacttttatcaatggctgatcaccagccaaaaaaggaaacatttcagttcctctcccctttcccactctctgccctttgacaacccagtctggaagtggatgcaggctctgattcttcctgtagagatgcctgccttgcatccttttcttttctgaaacaaagtctttgtctaacattgagccactcatttctttgtcctttctctctgactttatagagaactgcaaatctggcacacaccttaatatcagtctcctcctggcaaacatctagcttttggaactgtaagagcacaagtaatgagagctgttagaaactggccacactggccttagccccaaagctgaacagtttaagggtgttcttgctagaggccaggaatcccagaagagtatctggttcctgtttctttgatgtcttctaaaggagtacctctgtctaaaggctatatatacatgcttacttgacagacacagagaggaaacatctgaacacctggtttaccaaactggaccagccagcttacctcctcttctataccttgccccagttttagccacaagtctttgttaaacatcctcagttaagcagctcaatgataccatattagctgggaccccctcctgttatacaggagctctcctctctcttcatctatctgaagatgctacctatggatatatagtaaacttctccataaaactcaccctttgtgttctatgaattgtattcttcaaattcacaagacaggatcctgaaagcttaaggtgtctttggagaccaagagctgagaaagaccccataggtcttaaagttgctccaatagtccaacattatatatgtttgtagtttctagatagtatatttgtggcaatatattagagcagaaatagcccagtgaatatccttgaatgtccatggagccaaggttgaaaaattctggggtagaatgtcatttatatattaatcacatgtgatattaaatttccaaagtctacataatttattatacaacccaatattaaaaatatgtatatgttatagataggttaaacatatcattttagcttatatactttgcaaatcaatgatttttgtaatcaaacacaaatctactctcagaaacttttagcaatacaatactataaccagcctgacagaaatgaagatagtctaaagagacacttgcttccctcactttggtatcagactatgggaagcagtgaaccccaagaaactggaattccctcaggaatctcatgctgagagaataggaagcataaaccttgggccagcttacaggcaagcatttctctaggaaagatttgtaattcattagacaactttacatacacacaatgatgggtcaatggccggcgggaccatgccttgaccctgactgcttaggcatgcataactctgccccaaacataaacctcagcctcactttaagattccaaggattgactatggggttggaggtggtcattgggtcttttcgtccttcttcacaatatcatcacattgaatacatcccttttattgattggcactattaatttgacttttggaagatggtggtcaactgtaacttgttgggtcataagctgtgacattaagtccagtaacaatacttgtctattaacttgagtctttgtcctatgtactgagtcttctgaacttactttcttttatcaagttttatatccattgatcagcctagcccttggaacatcaaattctacactgtattgttgagttaaaccatgtagactatatacataagagagatcatgtgatatttatcattttgtgcccactcaacatcatgtccttcaggttcatcaatgctgttggaaatgacattttcctcttcctcttcctcttattgctgcttaaaagtagattttattccattgggtaaatgccacacattcttttttccactcgtatgtttatgtgtattggctgatttcatgtcttggtcattgtgaatagggctctgataaatgtgagagtgatgatgctagttctacatatttagaaacaaggttactggattgcatggtaatttaattgttaggttgtttttgagaatatgctatgccattttctgtaaaggctgtacttggcatttcttccaacaatgcataaaagttcccctttatccacatttttacccactatttctatctttcatgtcttttataatagtactttaaatgggggttgataattacattcttgtttgaatttgaattgttcagatgactagtgatgttaagatatgttttcatctacaatggccatttgtatgttatctcttcccctttctccttttcttccttgtttttagtctatttcatgttgttgagttgactgagttccctatatagtctggatatcagccccttgtcagatgtatgacttacaaatatttttcctgctgtgtaagttgccgctatactttgttaattctctcctgtgctgtgtaggttctttttctgttgaggtaattaaacttatatagttttgctttgtcctctgttctttggtcatatatataaaacaaactcactccccgaccagtgtcttggagctttctctctattttcataaagcagttttacagtttgaagtctcacattttgagtttgaattaattttgagttgccttgtatattgtgtgaaatggtggtttgttttcagtttcttagttggaagttaatatatgattttactattgggccatgtgtctgtgtttgttaacttttctctctaaatatctgcagcatattttgtaatatggtttctttagctttatcctttttggttataatttacttggctctccatgttctcttgaggctctataaaaattaagattatttaatctatttctatgaaaattgtaatgggaataagcctaattaagtaactaaatgacctctgtaatgaaaactttaaagtagtcaagagagaaactgaagatcctggaagatggagagacctcccatactcatggattgggaggatcaatattgtgaatatgtttatcttacatattcagcttataaaagcaatctacagacttaatgcaatccctatcaaaatattgttaggctgtgggctttggcctaattaggctatacccaccacagcatctttcttctttactttcaaagctactgtaaagaagatggcaacccctttacagagaacccctaggtgaatttgtaaccctatagcagactccccaggagaataatagatggcttaattcttgcttcctcaaagaagtttataggtccaagttattggtggcacatcacccacccataaaatgggttttccttaatgtgtccttctccctatgttccctacttactcagggttacatccttccctggaatgtaaaacccttcctttccctctgccaccaggaaatctgagatggcctgactataagcagtgctgtgaactcttaacacatgtaaaaatgtctcccatgcttactctgactcgtgggcctgaactctatttatgaaaatttatttatgcgctcttcttatgagccccactatactatttttctatgatgttaatttttttttactaataaatctcttatcaaataacaatccatcccactgtccattaacaacaagagagacctcatgaaataaagcttctgtactgtaaggaaaaaagttaactgagtaaagataaatatatagaatggaagaaatatatttgccagctctacatctgacaaaggattaatatctagattatgcaaagaactcagaagactaaacaaaaagaaaacaatcagcacaaccaggaaatgaggtaatgaaatagaaaatcctcaaaatcagaaacacaaattgccaataaatagttttaggtacttgagttgctaactctgctcccagaacttataggttctcaaacactatcctagatgcagctcttattggccagggagcctctagggctattgctccttctattgattgtcaccagaactagacagtaagaccttgtggtttgaatgcaaaatgtcccctagaggttcatgtattgcttgaactcttggtccctgttggctattcaaaccagctcaagcagcagggaatgtgcagatattccctttgcaaactttgtaaactctcaaggcacacaaatggccataaccctcccccaaggacctccaactgcaaggttccacccacagaacagtctagttgccctagtgggtagaccctatccctgtcctacagagtaaaaagtccaagctctggacttgaaattccaccagtcctcaccctggaaaacttcaccctgaaaagttacatcctccatctccaagaaactctatataagccttgccttcttctcagttctctgtttcttgctgtgacagaggcagccaccctcttgggttttttctcctcccagtaaatctcttgtgtgaggtttgttgtgtagtgtgactgtggaatttcttggttcctgacagtcaggataccttttcatcttagcgatgatgcttgcatttgatgccaaaaccaaggataggctctcctagtgcctaagcttcatcagaagcctatccctcatctccactccatctgaaatagatttaccttccagctcactgatctctcagcatcctatccaccaggagcaattaagtaagtttcaactttgattggtgtaaacatttctgtaggtctgaggaagtgactgctgagtgtctggcatgcctctggtacccccagccatagcccttaagtctacaactgccatcagtgcctgacacgacccccctactctggagctacaatcctgcagtgttcttaggcccaactgggctattgcaccccttcctgccctcttagcccactcttcattcagagctgcctgtgatcccagagttcctctaggtcctcatgggttttgtgactctgttctcctgccctttcctgtgcatgagaagcccctccccattagaactcagtgttcatccttgccttctggcctctacaaaagccctggtacagacttcaaatctcttctctggcttagccaggctaagctcctaagcttgttaagtgtggtgatgacccactgaactacttggtccttgtttggtacttcctgaaccctgaagatgcttgtgactacaggttgcagtgaaatttttcttctctttcattcacgggaaaggtgtcttccataccctctcactcccccttgcgatacttcttagaaaacccccagcctctaaactgggcaactaacctgaaggccctagatttattcacttggcaattaagttggcctcaatatcctttagataattaatccaaagagcagtctaattgcaacatagattccagtattatttgggacctttacaaatactgcaagcaattgggaagatggaaagagattccccattccgggattctcttttctttgctcaaagccctgttagtctagtctctcctggaacacactgtgtaaatgccctgtgctttaagttaccagttgatggatctgcaagtttgttgcaaagtgggagttaggagctggacttggcaggagagggagaaagcagaagagaggccaattacaatgtgcacacaccctgtaccacacacgcttctctggctgatgtacctctcagcttccttctgcatcatcctccgtctatagccagagctcaaaaaattcctgtctctgaactttctttgttttcagcttactagattcagttttacagggattcaggtggtttttttaggtataagtgacattagactcttgttttatgctatcccactgcagttaaaagatggctttggagttgggacatggctctcccacccccagacccaagggggtgcttgcttaaaggtttattccaaaatctctgtcccacatcaggcaacccacctgcctatgtgaggaacaaaggagagtgaaacaaaatagagagatgacagtatttccaatgggggctgtttgctattcatctcatattcttgattttggttcaattctctaaaacttttgctaaggcataaatcttatcgcaagctttgtaaaactattatgtaaactttctgtacctcaagatttgtaatcatatattgggtatgattaaaatctgtagcaaaagagttcatttaaaactcatagcacctgggttgatagttaaaaatctacataggtaatcttaaaggaaccatgtggcttgctttcctcttagctgatgtccctcatctggatggattcagcgacatggctgacagctgtctttactaggatgggaaaggatggattttgctgtgttacctcgctgccatcttgattaaaagtgaccacatggcataaaccaatcaagggaaaaccaattccctatagccattaggcccaatccagatgagttgtccactattttcgatcaaactaagaagcttcccccttataggcctcaacacacagtcccttcttttcctcttcagcctctctggtttccctttctccctcctcagaaacaggttgctcacctagtcagggcagtccttgaccaggactataatatcccagggtattgctagggaacaatttgtaacttgcctcctggctggtcttcacaaggccacccttaaaatggtaaattatgaaaaaatccaagaggtcatccaggaaagacacgaaaacccacctcaatttctagatggcttcataagacctgagatgaaaaacaactccttatgacctacttcttctaacatttccctgatattagggccaaacttaaatgtctagagaaaggatccctgactctacaggcagaagtctgagtcatggcctttaaggtgtaccatgggagaggtatgcttgaaaacaaaaaatacttgatgctaatgaaggccttttgattgatcatagcaactgcctaggctctctgctctcccaggtccctgtttcaaatgcagtcaggagggtcactaggcccatgtctgtttgaacccatgttaaccatccggacctgtaacgataactctttcttcccactacctgggttctgctgccactttagggcccccaaataacacacagagtcttatatcagttacaatactgctggctgatgactaggatttcttatttgccagctcagccttaattatcaaccataactactaatttatatattcttataaggacttatcgtactgaggacgctggccttagcatcttatctttctgggatcacatggcgacactactctttactacatttcccagaatcctcctcgacttctagctccacctatcttgctttcctattagccaaaagtgctgtatttatcaaccaataagacaaacatatacatagaaggacttcccccatcatggaccatgtccaaggtgccatcaagaagggcattgagatgttgactgccccatgtccctcatgacatggggacatcaagctcaggtcactcttcagccaacctcctaggtctggccatgacaactgagggctcctggtctctcttagcctgaccaccaacatatctgaccaggagccttgggtagacatcacagtatcagagaaatctatctctgtccttctggaacctgggggcatctacttagtactgatggagttttaggaacccacttggttcaggatctccaacttaccaactcagtagtggttccccttcccaagccctaaactctcctcttcatcatcccctcagagacctcccatttctctgtcctacacctcaagggtgccttcttttccatacctatcaattcttaggcacaaaatatccttgcctttacttggactgacctggatactcatctttccacccacataccttaggccatcctatcttaggggttctgggacatcccaatctatttggccaggctctggactctgacttattccatctcttcctaaatctaagcttaaataattcatagctgatcttctccttagtagttcacctctgtaaattagccaggctgacacctctaccttactaaactctctctctattcagttgggaatatagggaattaccctctaaggttcagctgccaattcctctggttattatttgggattagttatcactccaactcacaaagcccttaccctaaatagaaaacactttatttagtcatttacagtccccactaccaaggagcaaattctatccttcataggatggccaacttcttatgctcttggattccttccttccctttcctcgaccacccccatatgagatgacccttgacccctcacaggagccccttcttgcaccattaataagccactttgtaagcttcaccagtccctcctgcaggccttcctccaggctctggccctgcatcttctagacttaacttactccttctctctccagtttacagaaaaggagggatattcccttagggtcctgggttgctaactggaaccttcctttgtgcctgttgcatacttctcaaaaaatatagagcatactgtccaaggatgggcatcttgcctatgtgctctgaatgcagctgaccttatatgcaaataaaaagttaactttcacgttccccactactgtcttctcttttcaccacctggccttttccctaacatacaaaagtttccaaacactatccccttccaaagttctctcttcaggaaacattggtaaaggatgctacactttccttttcatccatgcccacatctcaatatttcaaactgactcttgctgatttgactctcttatgatgtgtatggatcacttgtttccactggattctgtcatccaacatatttgattccaaattctagagtccatctccagctgcttcttccctccacgtgctctatctatctatctctcctcccctactcattaagtgtactctctctggctcctggagcctactacacccttcagggccccatcctgtgggtaactctctagttactaagacatcactcctcctcctatattggaacccccccatttctttacctcctcagcctgaaaacttcctgctaagtcccacagctttcataagcccttctgggcctctgtgaccttgtccctcctgtctttcagctctatcctggaagtctcatagattctctatgcccttctgggtgtctctcttgcttctcagttcctacttggagcttatagaaattccctccagtggagtgctcttcctccctggacttggattttattaaagcctctatctgttactataaacagctttgcctcagtacattttgatggcctaaattggcatgctcaattttcaatggtggcaacttctaccactgcacaaacaaatgatttgaaaatcttttatatctaaactttctttctctctccctctatttcttcctaactacactggtccagggtagctcttacatatgaagaccccctacctctaagcaatagcctatcctaatagggtctggaaattgctctgtatcaggctgacaaaggctgattcagttctctgtaattcacctctccatctctcctttatcagggcttacccatatgcctgttttctctatttttgtatgataatttctgttctgaaaatgaaaattataaaacagggcaaatgataagattaaaaaatgattgtttaataaggtattaaagcttcatctccatgtactcatctataagaatgtagctcatactggtagctgaactttgtaatataaaagtcacctgggtggtattagttttaaaagaacatgaagggggtcctggaaggaaactgagacttggcactgtgcagcagaactgaagttcctaaagagagcccaggagaagctattgggaaaactcagccaagtcacaaatgtgggtctaagaaagtattatgaaggtctgaggatgtataaacttcagtaagttctaagaacatttttaaatctctgaggatacaaaagcttaagaaagttctgaagatataagaaattgttttacagcatgtaaatgaaagtgatttaaggcaatgaaaaatgttgcagatttctttctccctctctgctattgtaatattaagatttcaaaggttcagcaaacctatactcaaaggttcaaccagatccctcccatggtggggcctagagactgctcactaacaggttgccaaaaggagatatttttccctataaaacctaaatcagcctttgaaaaaacctgtcccctatgcttgctttctctatggtcaaacaagagattactgttgacattagctagagacatagggagactgcccttattggtcctgtaggagacatgatgcatatctaagaaggcactctgcctgttatgtaaaatgaccgatgatttatattctaattaataactgttggcacccccaataggagatgggagtcattggcaaactttgctatagctcttatcatagctgcccatcaggcacaatcaaaatacagagggtacacatcctactctctcaaactgtaggtataggcatggtagaagaagtggtccaaagttccccaaaggtcctagcatccctaatatctcttttagacaaatattgatactacctccctgtcactccatcttttgttgaataatgtcttgcctgactgctttggagaatgcttgttgtgtatccctctaaagtcaaaatcatgaccaccatttgtggcctaatccattgtctttctatttcactttgcctttttttttttttttttttttgagacagggtttctttgtagctttggagcctgtcctggaactcactctgaggaccaagctgcctttaaacttacagagatccacttgtctctgcctccttagtactgggattaaaggcatgttctaccaccacctggtgcctcttgttaattgttctaagccaaatatcactctcatcccttatccctctcaaatctctctcctagttatcacagacagttttaactcctcaggaaaatgctttgtgggaacactggattctgtagactgcaataattccttaccaccctgctgtagttggaagtttctcgtcccacctgccagttcccaaataactactctaaggcttaatattaattataattgtttggccagtgactctggcatattaacaactagctctcacagttaaattagccaatatttactaatctgtgtatcaccatgtggctgtggcttactggtaatgttctggcatcttaccccttcagggactacatggtgtctcctggactctgccttctttctctccatatctttgtttggatttcccacttggctctattctgcatggccattggccaaatcagatgtatttattaaccaataaaagcaacacatattcacagcaagcagaaggacatcccataacacccatctccttcctatgcccaaacattcataaggccccgattctctgtggcactcaagtttattgctgcctacctgctgagtggtctgggatttgtactctggtgttcctttttccaaaaataggggtggaatctggtgaaaaactcttgccaattcccatcacagggtttctagtggcatggcatgaaaaagcagcagtttaggtcatatcctctttagcagtcctgggtataaccactggtgtcgtcactggagccgtgggactaactacttcccttgctgtttaccatcagttttcctcccagttaatccaggatctctaatgggtggtagcaccctacagcccagaactccttgactcaagagatcctcctgtctcagcctcccgtgtagctgggactacaggcgtgtgccaactgacatattcatagctcgttgttgattccgtgggttgtggtacatggccgttcttagttagtggagcgatttgtctggttaattccaataaagaatgagactctggcatgctaactagttacccgagactagttatgctacaagtggcattcagctacccgagactaagcaataacaggtctgtgatgcccttagatgtcctgggctgcacatgcgctacactgactggctcagcatgtgcctaccctatgccggcagagaacggagtaagtagagcaagccgaaggtgaaaagcaagtaggggctcccatgtgtgtgaccctcattctttttttttttttgtcttttttatttttttccaacttttttatttgaattagaaacaggattgttttacatgacaatccctgttcccttctcccacccgtcttcccctacccacccccccaactaaaaccttatctgtcacatatattttctgctccccctggatggtgaggccttccatagggtgtcatcagtctttcgtatcctttgggataggtcctaggcccacccccgtgtgtcttggctcagggagtattcctctatatggaatgggctcccaaagtccacacctatgctagggataaatactgggcttctacaggaggtcccatagatttctgaggtttcctcacagaaacccatgttccttgggtattccagctatcagactgggaagcaagagttcccatatgttcaggtcagctgtttctgtgggtttcaccagcctggtctggacctctgtgctgtgctcttcactggtccttctctgcatctgggttccagttcagatcggtgattagttatgggtgtctgattctacttccaccagctgctggatgaaggcatataagtctgtcatcaatctcataatcaggtgagggcatttaaggtagcctctcctccgttgctgagataattagctggtgtcatctttgtcgatctccagacatttccctagtgcccgatttctctgtaaaccaaaaatgtctttctctattatgatatttccattcttgttatcatgtattcttccccggactcatactttctgctccctcatgtcctcggcatccctcttcttctccccttctcattctcctagctccctccccccagtttccatgctcccaatttgctcagcagatcttgaacctttccccttctccaggagaacatgtatgtctcttttagggaccaacatgtttattagcttctttggcagtgtggattgtaggctggtaattcttactctgtctaaaatccacatatgagtgagtacatatcatgtttgtctttttgcagttgggttaccatgctcagaatggtttcttctagattcatccattttcctgcaaatttcaagattccattgtttttttctgctgagtagtactccattgtgtaaatgtaccacattttctttatccattctttggttgagggacatctaggctgcttccagtttctggctattacaaatagtgctgctatgaacatcgttgaacagatgtccttgttgtatgaatgtgcttctttggggtatatgcctaagagtggaattgctggatcttgtggtagactgattcccatttttttgaggagttgccatactgatttccaaagtggctgtacaagttgtcactcccaccagcagtggagaagtgttcccctttctccacatcctctccaacatgaactgtcattggtgtttttgattttggccattctgacaggagtaagatggtatctcagagttgttttgattggcatttccctgatggctaagtatgttaaacactttcttatgtgtctttcagccattttagattcatctattgagaattgtctatttagttttgtaccccacttttaaattggattgtttggtgttttggagactagcttcttgagttctttgtatattttggggatcagccctctgtcagatgtgggattggtgaatatcttttcccagtctgtgggctgccattttgtcttgctgactgtctcctttgacttacagaagcttctcagtttcaggaggtcccatttatcaattgttgatctcagtatctgtgctactggtgtaatgttcaggaagcggtctcctgtacaattaattcaaaggtatttcccactttgtcttctaataggttcagtgtagctggatttatgttgagatctttgatccattttgacttaagttttgtgcaaggcgataggcttgggtctaattgcagtcttctacatgtctgcaaccattatgccagcaccattagttgaagatgttctctttgttccatcgtataaatttggattgtttgtcaaaaatcaggtgttcataggtgtgtggggtaatatcagggttttcaattctactccattggtctaccagtctatttttgtgccaatacctgttttcaggactatagctctgtaatagagcttgaagtcagagatggtgatgcctccagaagttcctgtattgtatagggatgttttggctatcctggatcttttgtttctccacataaagttgagaattgttctttcaaggtctgtgaagaattgtgttggggttttgatggggattgcattgaatctgtagattgcttttggcaagattgtcatttttactatgttgatcctacctatccaagagcatgggagatctttccattttgtggtatcttctttaatttctttctttagagactcaaaattcttatggataggtctttcacatttttggttagtgttacccaaaggtattttatgttgtttgtggcaattgtaaagggtgatgtttctctgatttctttctctaccagtgtgtcattggtgtatagtagggttacagattttttgagttaatcttgtatcctgccactttgctgaaggtttttatcagctgtaggagttccctggtagagtttttcgggtcactaatgtagactatcatatcatctgcaaatagtgagagtttcacttcttcctttctgatttgtattcccttgatctccttttgatgtcttattgctctagctaggacgtcaaggacaatattgaagaggtatggagagagtagacagccttgtcttgtccccgattttagaggaactggatcgagtttctctccatttaatttgatgttggctgttggcttgctgtatattgcttttattatgttgaggtattttcctgttatccctgatttctccaagacctttatcatgaaggggtgttggattttgttaaaggctttttcagcacctagtgagatgaccatgtgctttttttccccctcagtctgtttatatggtggattacattgatggattttcgtatcttgaaccatccttatatccctgggatgaagcctacttgatcatgatggatgatttctctgatatgatcttgtattcgaattgccaggattttattgataatttttgcatcaatgttcatgagggatattggtctgtagttctctttcttagttgtatctttgtgtggcttgggtatcaaggttattgtagcctcataaaaagagtttggcaatgtcccttctgtttctattttgtggaacaatttgaggagtattggtactagcacttctttgaatttctggtagaattctgcagtaaatccatctggcccccggatttttttggttgggagacttttggtgactgcttctatttccttagaggttataggtctgtttaagttgcctatctgttcttgattcaattatggtaagtgataactgtccagaaaattgtccatttcctttaaattttcaaattttgtggagtacaggttttcaaagtattacctgaagattctctggatttcctcagtgtccagtgttatgtcccccctttcatttctgattttgttaatttgcatgatctctctctgccttttggttaattttgataatggtttgtctatcttgttgatttttctcgaagaaccaactctttgttatattgattctttgaattgttttctttgttttgactttattgatttctgccctcagtttgattatttcctggtgcctgctcctccggggtgaatttgcttccattttttcttgagctttcagctgtgatgtcaactctctggtgtggctattctctagtttcttcatgtgagcactttgagctatgaactttcctcttagtactgctttcatagtgtcccataagtttgggtatgttgtgtcaacattttcattgaattctaggaagtctttaatttctttctttatttcttccttgacccaggaattttgcaattgcatgttgttcaatttccatgagttggaaggtttttgcactttgatttgtttttgatttctatctttaaagcatggtggtctgataacacacaggggattccaattttttttgtacctgttgagatttactatgttgccgagaatgtggttgatttttgagaaggtttcatgtgatgctgaaaaaaaggtatattcttttgtgtttggatagaaagttctataaatgtctgttaatcccaattgggtcataacttctgttagttcctttgtctctttgttaagtttttgtctggtggtcctgtccagtggtgagagaggggtgttgaagtctcccactataactgtgtgaggccttatttgtgatttgagttttaataatgtttcttttacgaatggtggtgcctttgtatttggggcatagatgtttagaattgagacttcttcctgatggatttttcctgtgatgaatatgaaatgaccttcttcatcttttttgattgattttggtttgaagtctatcttgttagatactaggatagctaccccaactcgtttcttggttccattttattggagtatcttatcccaaccctttactctgaggtaatgtctgtctttgaattcaaggtgtgtttcttgtatgcagcagaaggattgattctgtcttcatatccaatctgttagcctgtgtctttttataggcgagttaagaccattaatattgagggaaattaaggtccattgagtgtttattcttgtttgtttttggtttgttgttggtactggtattgtatgtggatttaccctgccttttattttgtgtttttgtagagtgggattatctattgcctatgtttatgcaagtgtagttaatttacttaggttggagttttccttccaatactttctgtagggctggattagtggttacatattgtttaaatctggttttgtcgtggaatatcctgttttctccatttatagtgattgaaagctttgctgggtctagtagtctgggctggcatccatgttttctcagagttggtagaatatctatccaggtccctctagcttttggattttccatggagaagtctggtgtaattctgataggtttgcctttatatgttacttggcatttttcccttgctgctcttaatattttttctgtattctgtacgtttcctgttttaattattatgtgacgaggggactttcttttgtggtccactctatttggtgttctgtaggcttcttgtactttcattggcatgtctttctttaggttgggaaagttttcttctatgattttgttgaatatgttttctgcacctttgagttgggtttcttcaccttcttctatacctattatacctatggtgtcccatatttcctggatattttgtgttatggatttgttagacttcagattttctttgcttgacgagtttatttcctctagtttgtcttcagtgtctgagattctgtcttccatctcttgtattctattggttatgcttgcatctgtggttcctgattgtttactcagcttttccacttccagcattccctcagtttgtgttttctttattgtctctaattcagttttcaggtcttgaactgtttccttcagctgtttaattgtattttcttggcttttttggctttccttgatttcttgcatattttggtttgtcttttcttccatttctctgaaggattttctgatttcctctcttaggttctctgtcatctacatgaagttgtttttaagattgctctcttctgcttcttctgtgttgggatgttcatgtcttgctggtgtagattccctagactctggtggtgtcatattggttttcctgttgttggatgtgttcttatattgtcatcttcccatctcttgttccagtgggtacagttggtgtcacttcctttcctggtgtgtatgggtccggtgttctcttcaggagtgtgaaattgactttgatactctgatgggtttcaagttgggtgcaggcaggtctcaggcacttgctctccaggtgggtgagagcagcactggcacagagatgtcagcagactctgggttgcttggtcctcaggggtggagttgtactgtcaaagatccctgggcagggtttgccagggtaggccaatggaagttgggcccaaggcaggggctgaagcagctcccctctgtactctctgcactctgtgggggccagaatagcccatcgatctcagcagagtcaggatcccaggaccctcagggactgattctgtctgcctgcagatcccggggtgggatttgccagggcaggcaggtggaagttgagcccaagttaggggccggatcagctcatctctggactctctgcactctgtctgagagcattttattagttgtaatgataaacctttctgccaaagctgcctggctctgccaccatacgggttctttctgctaagtcacctgagttatgccctctgtgttagggccccaaataacatggatagacttatgttaggtacaaagctgctagccaattgactagggttttttacttgctagcccagtcttaattatcaaccataaagacttatcttatcagacaccagctgcaggcatcttctcttgctggtatcacatggcaactacatagagaagagaacaggaggaagagaggagcaagagaaaaaggaccacttcctgtttgtccctgcttatatatgagtctgcctgctatgtcacttcctacctgtatcacaagacttctttttactatatttcccacaatcctcctcaactcctagtcccacctaacttgctgcctcattggccaaacagtactttattcaacaatcaataagataaacatacacaggatattcctcatcaattagtgtatctattgttcaatgatggtcttgctgatagtaggttttaatttgtgtatgtttacctttccttttcctgaaatatacttgacatttgttatcatggtatatagtttttgcatcagccttaaaaccttcttctttagactaattgtagctgtgtcttgactgttaacctgtaacggtgtccacgcacctttgggcatggcttcaggcagatggaagcagaaagagggaagcatgaggcatggcttcttttgtgtgtggtctttctcttgggtcagcctatccgataggaaggtcagagaagtgcttccacagttctttcttattatctgtgtaagtgttcccaaataaacacccatttatcatttgtcctgggtctagtgaaatccttacacctcgccttcaaggaatgttgcttctatgtcaaccagtcaggtatagtaaaagacaagatgtgacaagtccagatggatatccaaaaatgtacaaaacagcttgatgcctctgtttactggctcattgacagtccaatatggaactggatactacccttcttaactccccttctccttttccttaattctactagttgcacctgccttataaacttcatatgtagatttcttcaacaacagattcaaaagatttccagccagacttttaattaattgctattatagcattactgactcctagctacagagtcagaggcctgtgactcctgagtataccctgacatcaaagatcaatcttgttccaaggacttcaacacccccattcaacaggaagtaggctaatgataacattgcccattttctgacccctgactgtttatcaggagtaaataaaaagggtgtgtgtgtgggggggggtctggttggctattcaagccaactcaagcagcagggaagcctttgcatgccatgggcagataattcctttgtaagcttgtaaactctcaagggacacaaatggccaggccctaacctccacctgccaggttccacccacagaacagtctaactatcctagtggctggaccctgccccaccttggaaagcttcaccctgaaaagttctatccccttcctaagaaactgtataagccctgtatcctgttcagtttgctgctgtttgtccaaacagaggcagcaaccctccaggtttttaacttccaataaatcttttgtgtgaggtttattgtgtggtgtgactttgtggctttccttggctcccagctgccaggacacctttccagacaagctgtgacacttatagtgcccagctgctggtgctcttcaggaaagctctgaaacctttatttagaaggtggcgcctcactataaattgtttgctcagagtgggccttgagactttatagcccagtttcatttctggttactctctttttccgagtgtagattcattgtgatcacagaacctcttgtttttgtttttgtttttttgttcaaattagaaacaagcctgcttcacatgtcaatcctagctccctcttactcccctcccccccaccccaccaatccccagcgagggtaaggccctccatgggagatccccaaagtctgtcatattatcctgggcagggcctaggccctcccccatgtgtccaggctgagagagcatctctccatgtggaatgagctctcaaagtccttgcgtacaccggggataaatactgatctaccgccagaggccccatagagtgccaaggccttctcactgacatctacattcagggatctggatcagtcccatgctggcctcccagccatcagtctggggtccatgcactcccccttgttcaggtcagctatttttgtggggttcacaagcccagtcttgacctctttgctcatcactcctccctctctgcaactgggttccagagttcagttcagtgtttagttgtgagtgtctgcctctgcttccattagctactagatgaaggctctaggatggcatataaagtagtcatcagtctcattataggggaagggcatttaaggtagcctctccactgttgcttagattgccagttggtgtcgtctttgtagatctctagaaatctccctagtgccaggtgtctcctcaaacctataatgactccctctattatggtatcaatcatcctgctctactttattcttcccgactcaaccttcctgctcctccatttgctcctctccccatctccccctctctttctccctgctccctctctcctacccacatgctcccaattagctcaggagaccctgtccccttccccttctccgggggcccatgcattcttcttttggggccctccttgtttcctagttcctctggtgatgtggattgtaggctggtaatcctttgctctatgtctaaaatccatatatgagtatgtacataccatgtttgtctttttgtgactgggactgggttacctcactcaggatggtttcttctggttccatccatttgcctgagaatttcaagattccattgttttgttttgttttgtttgtttttttctgctgagtagtactccattgtgtaaatgtaccacaacttctcttgtttgtaacatcatgcctttcctgtttacagtcacgccttccttgctagtatgtatagtatctccctggaaccataagcccaaataaaccccttttaccttaagctgcttttgttaggatattttatcaatgcaacaagaaaagtgaatgtgacataccttatttctgaacaacccaaatgttctgaattcagaacaacgagaaatcaagctggaactgaactagttgcttcctccttttattagcagtcacagtgctagaagataccatgcagcctgttagaggagaaaagtcatcagcaatcacacccaactgtggaccctgcgtattgcagttctgacctgcccaataagctatgtccacaggtataatagtgatgtgagtgtttcagggttaatctgtcatgttctgattgattcatccgaggtctactctgtgggaagaaacacaagcttggtactggcgacctattgtggtggtttgaaggaaaatggtcaccaaatggaatggcagtgttaggaggtgtggacttggtggaataggtgtggtcttgttggaggaagtgtgtctctgtggaggaaggctctgaggtctcatatatgctcaagccatgtctagtgcgacagaccatttcctgttgcctgcaagtcaagatgtaggacacttggctactttttcagcaccatgtctgcctgcatgtcaccatgtggcaccatgatgaaaatggactaaacttctgaaaatgtaagccaccccaattaaatgtttttcctttataagagttgtcacgatcatggtgaatcttcgcagcaaaagaaaccctaactgggacaaaagttgttaccaggcactggaatattgctgtgaaaggcatgaccacacattttttggaggaatttgaacttttcaaatctatttatggaaacatcggagaggcagattgcaataatggggaaaatccctgttatagttaaggctggtgacaagcttttctatggtgaataaacagcatcctaacaaaagaccacagcacagactaggtgctgaggcctttaatctgttacgtttgtggtgaacttacagtggtacacattgctttcatagctgcccttacttacatggaatcttcctgtgtttaacccatctcagtgacactgatcctttccacatattcacaatgagcatttaaggaatcagggattttatttattctgtacttcccccaaggagactgcaactagtagaatgttttatgttcatttttccctttagtctcattgacctgactgtgctcagtccagtcagtccctcagaccaggctaagacacagcattgggctttatgaatcacattgttaggcttgtctttcccaaacagttgaggctgaacttgacttcaaagtggtctagtcctaaggacagtcagacagatgggttttataattaacttctaagagcctcgggtctctcatgtcttataattcctggtgaaaggaaataaagttaaatgtcattttagttctatgagagttaatttccagctacatcaaaaaattcctcatgatgctttgaagttttaatggtcatgtcctccagttgcattgtggtccctatatgctctacagcttgggtttgaaatgtccttcaatgtccagagatgttgaaagcccatggtgatactgggtaacagtgaaaccatcaaagtttagtttgagaaagttataccattgagggcacccaaaggagatatttttcacttctgtccctttctcttttttcttcctttttaaccaccaaggatggagcagctttgccccaccacgtgatctgctgcctagccacagtctaaagcaatagggccaactgaaacctttgatcctaactaaagctttcttctttacaagatggttgtcttgagtgtttatcacatcaatagaaagcttattaatacaacaaggcaaagacagatggactttgtctcttagggaacttaaagctttgggggtttgttcttaattttacttccataagaagaattcttacttttattggggtagaagttatattattatgaaaccttagactcttgctattgttaagagcttctcattattgagaaatcaataatggccaataactttcttcatttctcttaagatggtaagacttttttatcttcactggaggaaataaaaatcaattctctttctagacacattctcatgtgcttatatactggcagatggagcctgccctcgtttacagcctgctggccttcaaagtattttttcccgataaaatcctaatgtcaaaatggtgaaaattattaaactcccatagggatatttgatgctcctataggatattggagaaatctcaagaagaggtccacagctttcattctaaagttcctgtggcttaattctccaggagtaataaggagaagaggtcatcttgtagggctgctctgttccacctcatgtaatgattcccattttatccttagaaaataaatactttccctccagaaactgagaatgaatcagaatgacatattgattcctgcagagcccactacagatacattcattcaaatgccactccaggttcacgtttgccagaaactattagcagaattattggaagggatatttctaatagtgcttccagttcaagtgtcggaagagacttaaattaatgccagaaagggcccttataacatgcggataaaaaatagaattattttaccttggggcagaggacaccaaagaggtagtcatacatacaaacaagtcttagtttgcagttctggctcctgagaagtgtcatggaacatccaagacccctacacatcattgccttatgcagttaaactgaagcacactgaagtctgaagtgtgacacagcatacagctacagcccttaggcagtggttcctagtcagggactttgctccacttctgccatctcttctgtgcaatttgctttcttctctatgcaattgggatgaatgatttttaaatacatttccgtctctcaaattctagtctttgatatattgcatttctcagctgtgtgctcacaaacttgggaaataaatccctggggaaaggagcactttttaaagtcccaaaccttacagaacagacccatggagcataacagaggtgatgtgtaacatttgttaggattctcttattatattcccagtgtttgagttccaacttcatcactcagttggccttggtgaacacagtctcttcactgtggtgggatgctagtagacttgactccatggggccacgtaagaccacctaacaaagcccccaccagtgtgaattttacatagaaactaagccaaatgtacaggatcctcaagaagttgaactctgaacagtgagaagaaaaaagcgtttcaggaaggctgacatttctgtatttgaagccatctgtgaggagccataaggaaggaaagataggtatggagtgggagatggcaagggcaaaagtgaatacacagagatgaggtggaatatgccagtctctcactgcccccaagcctcccactgcaactgtacagatgtcttgcaggagaagctgccactttcatttcagagccaaaggacacatggctcatgactcaaagtctggcttaccttcatctgttgaatcttgatgacaaagaggggtgggtgggtatgaaagtgtgtgtgtatgttccatgtgtgctcatggccttatttaaggaagggaagggaattctggaaaacataagttccagtttagttaacttcaccgagtatgaatatgtgaactaagttagctaagtcttgctgttcctcttcagaaaaaggtgtctagcaatgctatttaaagtcacccccatcactgtaagccagcagttctcaaccttcataatactgcaacagtttaatatagctcctcatattgtggtgatccccaactataaaattattttttattgctacttgataactatacattttctattgttgtgaatagtaatgtaaatgtctgatatgtgggatatttgatgtatgaccccagtgaaagggtaaattaactccccaaggggtcatgacccacacaggttaataaccaccaccataaaccattctatttagaatcaccttatttattcattcattttatttatatatttatgtattttgtcttgtcagattacaataaaagctccatgaatgtaggctggagattgccttggtcaccattgttataaccaacacccagaactatgcctagagtatcctaggtatttaatgatgatttagtgacaatggttaagccatagcatgtatgtaatgataactctttctgccagctgcctggattctgccaccgctttagggcccccaaataacacacagagtcttatattagttacaatgctggccaatgactatgatttcttatttgctagctctgtcttaagtatcaaccataaccaataatctatatattttataaagacttatcttattgaggatgccagcggcatgcatcttctcctcccccggatcacatgacaaccccctttactacatttcccagaatcctccttctctcctagccccttgcttccctattggctaacagtgttttattcattaaccaataagacaaacctatacacagaaggacttcccccatcacaagtataagtatttgaattaatttgtaaataggaaaccctaaacctgaagccagtgtttagattatggttatgtgccaaattctatgtaagcatgtacacagtgaattagttagagttgtatagagtacaacctgaagttttagtggtatctcaaaagctttgccttaagataaatttatttttattttttagtttcattttacattccaaccacagtactccctcccactcctcttcctatcccccttgcctcctcccaaccctccttacctaccccctatcccacccccagtccactcctcacgggtaaggactcagtcttaatgcatgggagagggggcctgactctgccccaacctattgtgccagattatttttttatttaatgcatacaagtctctcttgcctccatattgtatgtaccatgtgtgtacagtgcctgaggagttcagaactggaattatagacagttgatagtcaccatgagaattctggaaactgaactcatgtcctgtgcaaaagttgccagtgctctaatcactgagccatctctccctccccatgaaaataatcttttcttagtgaatgggtactcctgaaggaggccttttcaaagggcctcatggtcaactctttatatcacatgggaacaggaaattaccatcttttgctcccagccaatcaaatttggagagcggacatactggttctttgaagacctcacttggaagaaatgtttgtaatttccatccacattttattggtgagagcttgcctaccaacctataataagcaatgagtcaaaccctcaggaaaaaattgaaattgttattggcagcatttcttcattatgtgggtatttgtttctgcaagttgattgactaatgttccctcaaaccagcaaccaaacttaatgagtcttcatcttgattttttttgtgtgtgaatatatgcatgcatgtgtggtaaatgaatgtatgtatttgtgtgtgagtgaccatgggtgtatgtggataaggaggccagagatcaatatcagttgtcttcctcaattgctctcctccttattttttgaggtgggctctctcactgaacttaaagcccacctatttgtctagtaagctgtaaacattccctggtctatacctccctagtgctgatgttacaagtgtgcagtactctgctcagtcttttaaaatatatacactgggaatctgaactcagatcctcctaactaagcaacaaacaccttaccaattaagccatctctccaattcattgctttaaatcaatacttcgataaagatatttaaaccataatagaatttgtagaatttggattgcttttcatagaatattagtaatgtatttgtaccacaaatttttaagaatcaggtttctgatcttagtcatgagtgcattcaagaataaaagtgaggccagaatatcttcattctgaattgagtgaatgctatggttaatgtagtgtgtgtgtgtgtgtgtgtgtgtgtgtgtgtgtgtgtgtgtgtgtgtgtgaagaaaaagacatgaagttgagagggagagagagggaatgtgggagaaattagaaggtgaaagagtaggatggaaattagacaaaagcagtactcatgaagttctctaaaattaataaagaataaaatgttaatttttatcttaacagaatctgtagtcatctaggagatgggactctgggtatgctggcaggacattatcatgcttgctagtgaaggaggtgtcagcacctgcccactgtggtgacacccttccccaggcaagggaccctggcctgtgtgagagtggaggaaatgagctgagttctggaatgtgttcatgcattcattgctctatccccttaactgtgggcgtgaagcagatgtagccagctgctttaagctcctgttgccatgatggactgcagcctaaaattgtgatctaaaaaatggcctctcttctggaggttgctgttgccagtgtatttatcacagcaacagcaaagaaaactagaacagtgaatatgacactttgtttagaaaatggcagtggaataagaaacgctgtgcagttagaagagaattctgtaatatacaaatgagccataagaatcacccaggagaatacatacatgtgacattgttgaaattattctaaagccttttatatttgtggctcattgtagaaccaataataatgttaatttagtagaggagttgatgtttttttcagtgtgactgtgtggcatagaggaaggcatgcaatttatgggaagaccgggtctttgttctgattctagctatgcatcttagttcctatccaaggggttcagcccctattaattaattttctcatctgtaagtggctaaaggagcggggtggaccaatccaaccaatggtttggtcttccttggcacacaataaatgctccatcgatgataatttttaattgctctttcttttagacaagtgttagctaaaaatatgttaaaataatataaatccagtttatagaaaagctcctttttttctggaatattttctgttgcctggagaataagttcgaatgtggtttgtgcatcatgatttgagtcttatgtccaggactatggctgagtctccatcagatcactttgtatctgggaattctgcacatatctttcacatatcactaaaaagcgctctaataaagattggaaagatgctgtcctagtttgtccttatatgtcagaatctaagtacccactgagagcatctttaataagaatatagacagtgacctggaagttagcatgtaaaaaacaagttattagcaaaaaaaattcagctacttttatttcagcttcattgtctaaaacaccttatgcataaagaactaacagggttccttcctacaaagaatctactttcataaatggattcacaagagatgttggtaaaagcagagccacagattgataacaggatctcaggacttatcagtgccttccagaatttcatttttgcatgcccaatcatgatttttttaaagctagtccttcaccactgagttaaaacacacgaataatttatgagctcctggtacattatttttttcctcaaggcattgtctttgcatgatattgcagcatttgatagctggttaacccaggaagatacccttctgtatcatgatttagatggaggcaacttccatctctaatggtgtaagcacttttgtctgttgctagcagaatggatacatatgaggaccgttaatttagctctaatgtgtactgcatgggaaaagctatgggggttctatttagttggtagtaaacaactttggaatcaatgtgtttttctttactgaagacttgcttagtgcattggaaaaaaattctattagtttgcctcatttagtagtcaccaagcagcctgacacgcgagccagtggcacccattaaggccagtgtgactctttgcagcaaactgaaccaagccatctgaattcaaccccagtggcatcattcagcaggccagacagagccatgatttagggtattcccaacattttatggcaatttgtttcatttgccgcaggcccataacgatgcaaattgccataaagtgggataatcaggcagtagaagtgtcataaaactgcaggggaaacaaatttccatcttggaactttgcatgccgatgaacatgggggagagtaaatgtggacctggcttttccagtgttctctggttgccaaagtctatgccaagcagaaatgattccattttgtcaatttgtactcatttcaaactaaggaacagcagtgaaagaggacctgaaaatatgaggaagcattgggccaaagtctttttcagatgcaaggcctgtgctaccataaggagtggcccagagtgggaaggccaaatgtttgccattagatagatggaggacaaatgaaagcactgttaggggttggagtgctttggccctctgaaatgtcatagtacttctcttgatgcagttttggaatcgtgtatctgtatctcttaccatgaaaggcttgtgccacagtgagaaacaacaagctggaagtaccaaggctaggccatggctcgttgggccctgctgagaaccggaatgaggatgagatggaagcatccatgctcacatatccattgattgcccttcaaatgaatggaaagttctcttcagtggctgaaaagcaactctctttgtcttcctgctgctttatttctatgtttttcctcctagctcatggatcatttgcttgtgtcaggaatcatgagtcatccctggaagccctatgaggcctggaactttcaggtcttactctgtttctgagaatgggttgctttctgtaccttttataattgtgttgttcgttttgttccctggtttgtaatattattgcattagtgccattggcttgacagccccccccaggatacattccataccttggcttctgctaagtgaactcttgacacatatctcagtaagagtaattctttgccaagcttttggtgtaagactgaaaattattttctcctttaaaaatgtaaaatatcacccaggaagagcaactctagaagttctctgatttgatttcataaaccaaatgtgtcaggagctctggatgagcaagattgtttcctggtcatgatactgctgtatctgagtcacgaaacactgaagctggtggacactgctctcctgagtgcaatatatttttttctagttttaattaagaagatgtgggcagcatgctgtaagatattgagtgaattggctgcctttctatcagaagactagctcctttgggttatatattctaaaggtgttgccttacagaatacatagagactaggttctacataattgtgcatttatgtgtaatgtagaaatccacattggcaaacatctcagcaaatgaaaaattatatccaggatacacagatatgagcccagtagaaattcttacagtgttggtgaagtgactggtgcaatatcccatagaactcttatgtagacgttatccttaattgttttaatttttagctttaatattaattgataatctttagcatgagtgtgtgtttattgtgtatgtggacaagtgtatattgtgcatgtgaatgtgagcatgctgtggcctactgttgaggtcagaagacaaccttgtagagtggattctctccttcattctctccatgtctttgagggacagaactcaggtcttaggcttatgcagcaagctcttaacctactgagctatctcactggccctgagacagttactttttgaacaatgtgtcagtggtctctctggtggtctctccaaagccaaagtacaaagagctactgtgttgtgtgcctttggtgatctccttcaattccttcttcaaccctgatattcttctcctcgcaaactttctactgcttttgggaccctaacttttttatttctctgaaagttattccacaaatggaacttacctcatctgtttccacccataaacacttattcaaggcccttgtaatagcagctgattgaccaaacccaggtattttagattggagaggaaatgatatacattgtgtattctcaaagaatttttgtttggagagcagtttttcttttctatttttaagtatgacattttaaaacttttatttttaatttattttattttaatagtatttatacaatatattttgatcatgttttcccctcctcaccaaaatcctcccagatcctttctacctcccaacttgatgttgtctctctcttaaaacaacaaaacaccccaaaacaaaaacaaaaactaaaaatcaaaacaataagacaaaaaatcaataagacaaaacaaaataacaataataataagaccaaagcaaaaataaccaaaacccaaaataatcatgatgaccatcatataggcaaataatgaggttgatttagcttgtaaaaataaaaatattatggggagtatttctgttgtgtacaggggaaaagatggaaaattaattaaatataataatttataactcacctgcctctcagtagaggaatgattttgaccttctaagtatcaggaagtaaagtcaaatgtttatgttctaagaggctgatgaggtagataataggtgatatcccaatatatgggaagatagcgaacagaaggcaaagtcacatttgggtagaagcacataaatccaaggattgggtctcattgttgagtttggagtgatgataaaatgagaaaggaatggaaatggcatttctattggcataatataggttcttctgctaatattcaagatttaaccaaagaaccacctcagagcctagttataattgtgatgggggcttcaatgatgggaaacattcttggaagtctcattcagccaaaaccattgagttttgtttatttatttcattcattaaaattatctcagttaaaactaacaataaacttgctgctttggacctaattccattcaagtgggaggaatgatgtcagtactcactagtcaacagcctgatgacaccagaaattttgtgtgattggaaatattagaaacatgaaaacatctttctagaagtgtgaatgggacaaagaattctaaattcagaaggtgattttagaaacaagagataaattattagcaagataatgcattttaaaaattatttttattttttgaaattataatataaatacattgatgttcccctctcctttcctcctttcaacccattccatgcaccccagtataatgataaatctttctgccagctgtgcaagttgctcccactgccatgttaaagtcccaagtaacacatagaaacttatattaggtacaatgctgctggccaatgactaggatttcttatctgatatctctgtcttaagtatcaaccataattattaatctatatattttataagacttatcttattgaggatgctggcagtgtgtgtccattcttctcagggccacagagaggaggaagagaacgacttcctgcttgtccctgcttatattctgattctgcctgctatgtcacttcctgcctggatcacaagactttactacatttcccagaatcctcattgactccttagttccgcctaacttgcttccctattggccaatagtgttttattcattaaccaataagagagacatatacacagaaggacaacccccatcaccccggtgccctctttcaaactcatggtctttaatttttaaattgttgctgctctatgtgcacacacacatacacaagcacacaatatgcatatgtagtactaaatacataaataaaacattatctgtctgtctaatattacttgtaagtacaggaatccatgttaattgatgttagataaccaatttgtaggattttcccctaaggaagaagatttctcccactctcaatattctttaggtagctgtatttctctttacctaggtttggggccccatgacaattcccccttctagatcagcatgtctgttggtggtgtacttgctaaagtcttcttgggcagccatggtgataggacttctgacagttttaggagatggaatctaactgacacttcctattcctctggctcttacaatctctctgccccctcctcagctatgatcctgtgatggggaatgtactgaactcgggtgggtggaaggcataaagctcacaagtggcggtggggctcaggtagcatttggcggaaaggtttatcataacaatcctgagtcttaagcacaggaattatgttgtggatctctctcttaaaattgaaatcttgtcactgtggagaattttatcacaaatactgtatgtacagactttgttgcaagatgtaggaagttcttcacacattacatgcttcaattcaactttgagtgagaagtaaaatcagatatttttcaagtgtctatttcaggtaaacagatttccatgataacttagtacttagcaccaccatatggttacatgattcctaagattttattacctttatatcaagcagatgcatccggagttgctgaatgcaattgagttcatctgaggagtgaaagagctacagaaggttctcttccacatgcagtataacagtcttggtcacagggttctggtgggatgtgatctgctcgaatgtacaggatcagaactggaaaaggaatttccagaaaaaatatgagacatggtcatcacaggtctatccccaggttccttatccatcatgcttaaaaaatttgttgccatccaatatgctgtttccaacttttccctaattcaaggtagaaactctctgaggggaaaacggctcattatgtgaggagtctttcttttattgacctgaaatggagaaataggataatgcctcacatttattccatctttatagcagccccatattcatgggttcaagtttctttgttcatctgggttaaatagactgttccaaagcactcagaaactatacatacaacctggacctttgcaaaagagaagtgagaatgttccaggtgatggaagtgattccatccagccagtgccatccaagaaaaagaatatgagtcacagactaatgtcaaaataaaagtacagaactcgaagagactagaagaacactaggagggtctgtgaaaaggaaaatgtctaaaattctatttgatgcgttgactgtttctgaaaggacacaaaggcattggagctgcggactggatagtggctagagggaagcttactttgcactgaagattattttacctcttgtattttaatttttgtttatttttaaatttgttgtttattttatgcatataggtgttttatctgcattgatgtctattcatcacatgtgtgcctgatgaccaaggaagctagaagagggtgttagataccctgcaactagagttacagatagttgttagcttaactattggccattgatctttttattagacaaatcacagtgacatatctctatatagtataatcaaataccttgcaacattgaggagtggaaataattagaaacttggtgtggcatcttctattagtgctacctggagaaagagagcctgggagaggtagagtttttaagccttcatatattaagaggttgaacagattgtagaagggaaagatagtggtaggtgaccagaaaattagtttcttttttaaatttacaaatgagaagcatggcagctgctaaagcatgaatgcagggtagccatccctggtaaggtctacttcttttgacaggtaaactatgactataaagaaagatcccagttggtggcctaggaccccaagggcatatccctcttttcctgttacacagagggagaagggatgagttaggtctgggaagtggagggccaggccctgaagaagggccccttggagtttctgaaagggcttggtattaggtatgagaagggctttatgtgaggggcaagggctgcctcctatagggtatgggcaatgagggaaaaggtggcaatctaggagtataagaggccagccattcctaggaatgataaaaatctctttggtaaaggggtatacaagggactggattatgtgttttctatccacaattacctttgtggattgtggtaatggttagtcccattaagttgattacctaagggatagacagttggaccttagatagtgatactttatagccccagccggataagaaatttagaaggacagaggttcaatttggctaatttgtagggctagactaaagaggagaaggtcatctacatattgtataagtttagatttggggagagacaaagagagtagatccgatttcagggcctgaccaaataggtacgggctgtcctggaatccttagagtagaacagttaaggtgagttgggtagagaggtgggcattggggtcagtccaggttaaagcaaagatgttttgtgactaagtatgtagggagatatagaagaaggtatccttaaggtacaagattaaaaaaacaaaaaacaaaaaactgagaggttcctgagaggatagtggggaaggttagcgacagacaggatggagagttacttttgcagattgatgagctatggatcttgagccaggcagtaggcctcattgtgctttttaagtgcagtaataggggttttaaagagggaagatgtggggcaaagtagtgttttttcttaataaggtcagagatgataagcttaagtcccctgaggttccagaacaggaatgggtactaggctttggtgacgaccaagtagggtcttataaattggatgatgatggggggatggtgtctggcaacagaggggttttggatatcccagacatggggggtccacctgagaggctggtaaagaaatgacatttggagccagtaaggctaggaggagaggagggactactgatgaccttggggtcaggcaaatgttgtcgaaggtaagactataggattggataatatattggaattcttcaacgaaagtagaggaattagagatataagacaccagattttgtttttgtttacttgtaattggagagttcaattaatgaaaaggggacatgtgccttgacccagctgtccaccccagcaaccaccagcagaaggagaaccagagccaggttggaccaagtagggagaggtaggtatgggggtcaaatggctgagtgagagccagtatcagagggactgaaggctgctggtgtggtgaaagtgggtgccaggaacttagagcagtctgttgctgaagagggagaagaggagaccagaggagttggaggagggggaaggagctgtgtgttgagaccattgggggtaaggggctcattatcaggatcaagagtagtggaggatcaggaagggaagaaggtggagaggttggaggttttccaactggcatccaaaaggggagtcaggaggtatggatgatgctgttcctatgtgtgaggaagaagggaaggtcttaggcctgaagtccaaggtgtccccaggacccagggaggaccaatctggaagacacagccattcgatggatcattaccacctgaacagggatcaagggctaaatgtccaaggagactcagtggctggtaccagggctttcgaaaccagaaggtaaagactgatctcgaaaatgaatccttacccaagggaaagggtcagatgtggggctggtggagagggtcaactgtagccttaaagaccatggctgggggtacttgtgtgtcctcggatccagggaagagtttacacctaccaaagagaaaacttaccaactactgctgttggatgggctgaccagcaattggtgagccacaaggtagtctgttacaggtagattggagataaagggatagagtcctagagcatcttacacccctgagtgggattgtgcagatactaggatgtccttctaaggagtctcaacaccaatgttagttgttttttctttctgtcattgggaagggcctaggaataccacaaagttataccatgcaacagacctcactgagagatgtgtgtgtgtgtgggggggtatacaagagctgcctctgagtggagataaaggagaaagagagcagtctgtgaaggcatgggccttataaagatgtatagtgagggcattgcatagggagaatatatgacttgtgacaacagtagaaatgtgttgcatatagtgactggtgtagagtggctaaaggagggctggcagcgcacctggttctagaatgtgggtggtcctcggtttaccaacattatgtatcctgaaaacaatgtatttagacctaagttgaacatgtgaccccatgatatatacctaccccattgcttgctaatctcctgaacctgtgatatgtaactggcctttttgccttgcagaaatgtgtcttcttgttttttattctttaattactactcatatttatacatccatcccccccattcccttgccctcccatcctcccatgttccccccaactccccaacccatccccctaactcctccccagggatagtgaggctcttcacgggggactttcaaagtctgtcatatcatttggtggagggcctagaccctccttgctgtatctggactgcaatagtatccctccatagggaatgagctcccaaagtccatttatgctctagggataaacactggctccactgttagaggtcccatagacttgtgaggagccgcactcacattcgccattacaagatggcactgacatcctctgccggatcaagtaaacaacgttggtatccatgtgcccagtgtttttccactgcctagccccgcctattccatggcgtcatatagggtgatgagtcatgcacctctcccagctgtacacgcattgctcagagtttgtgagcctttattaggggatgggattcttggctcggggtctccgctctggtaagcttatgctctcctctcaagacgcattaaagctttactgcagaaggatccgaatgtcctgtgtggttcttgccggcaagactatcgggtgggacatagactctctcgctggcatccacattcagagggcttggtttggtccaatactgtttccccagctttatgactagggtgtccatgctatcagtaggtcaggtccactgtttctgtgggtttctccagccccatcttggatcctttgctcatccctcctcttctcggatacctcgatgacccaccttcctcatgatgtgttcttgcgcacacatctatccacgggcagccttgagcactgagtcctccactcttctgtccagatgctaacagccaattatctcaactgctgttttctgccagccctacttcttccccacaaaagggacctcaaaagccagtgaaggctgctttctgaattcttgactttgggagaggcagccagttaatctagttctaaatatagcttgctttaatcagacattcatggaattgtgcccccaccatcctcaggccttacaagttttcaactgctgctctcactgcctgttgactgcagtacctgctacctctgcttcttcatcatggactctaaccctctggaaccataagcttaaaagaaacccttccttctatatatggttcagtcatggtattttatcactgcaataggcaaataagcaagacactaccatacctgagtttagtttgcaaccctggcaataaaataaaacacagtttagtctagaagaaagtttctgttcacaaatccctccccttccccatcccccatctcactctcccccatccctctctcccccacctctttcctaatctgagttatctgttaatttcaaaaaagactctggctttctgatattaatgattctcattatggaggtggtgtctttaaaaagaatcatgcatgcctgaattttctttcctcttttaatttttaagtctgtatttccaattcatggaagtttttgaaaaccaagtagtggaataatctctcaagattttgaaggggaaagagttttgtcttttctaaatggcttgtactgagaaaagaggaaactatcactgttgattttcttttatgggtcctttttcatagctatgagacaaaattctggctgtgacttgccttcattttgcaatagttcacagacacacaggagtcagacagcagtgtttagtttattttttacatcctaattacattatttctgtttttctgtgtttggcatataccttcacatcacacttaatgatttactcatttgttcagtatgttgggaatatgctatatctatagatttcattatttatgctataaaaagctttgtgaaaagatgaatccattactcctgctgatattttaaacagatttatggctttcaaatatagtcccagatgttaaaagtttaattccttttgaatatattatttaaatactatttcaacattgaatcttccttttttgactcttgtctcattttccattacattttattagtgctttggtagtgtttggtgtgtatataaagtattttcttaattcctctttatagtaattagacaatagttcttacttatacagtttagctttttacacattctgttactgttggtcaactgtagtataaaagtatttagtggcaaattctagaaataagcaaccaagggctctgaaatacattataccttgttaaaattattttatcttatttattgtggctactttataagttacacattattgtgaatattacagaaaaaggtgagagataccagatgcctgtaatttcaggcaggcctgatatagggattatggaatgataactaggcataaggaggtactattgtgtagggaagttggaaaagcttaaaagttcctttcattggagggaaaatgcaaggaacagagagagtgcttatctgtatttagatagtttagcttctgttctcatccttaggatgcaacagcaacatttcaacacaggtgtctcagaagtaacagaaatatattcaaccccaagttcccacaaaatgagcattcagccaaatatagatttaaaaatgaccggcagatcactcacagggccatgacctagtgaatagaaagtagagtgaattttgtgattaacaaaagctgtgtgtgtgtgtgtgtgtgtgtgtgtgtgtgtgtgtgtgtgtgtgtgtgtgtatacaggtagcatagtttcagaatggattcagaaaagagtctatatagatgaacatcaggctgcagaccagtgccaggaggggactgatggagtcaaatttgagagctagagctgcacaattcatctacaagatgaaagggcaaacagggtcaggagcagaaaacagaccaggatcaggaaatgggggtcaggtccagatccagatgaatggacaggtggatgtgcaggcaatcaagtaggctgtaacagcattgggggactgagctgagtcagggagcccttggtccttgatgttcataccaggtattggatgataggtgggtgtgggtcatgccctctcagtgttaggtttccatcactttatggggtccaggtgaaggatttacccgctttctttgatttggtgtgcccaataagttgttgggcctggtttcaatggttttattttaatatgcctctgaacacctacagttttgagtctctgcagtaaacttatagggctgtttccctttttattcccagtgacaagtcacttatcagtctgtgttagatggctgaggcctgccagcagtgcaattcctgggtccatccaggggttgcaatctcgagccttcctcaaaatggagtagaaagttgcttttataatggagggtaagatgtagcctgaaaaaccacaatttcatgcaatgtgaagtaagagtagagcagagcctggtctcaacagtcacatgttctgtgtgtgtgtgtgtgtgtgtgtgtgtgtgtgtgtgtgtgtgtgtgtgtacatggtatctcaggctgtgtgtgtatacatggtgttacaggctgtatgtatgtatggtgtcccatggtgtgtgtgtgtgtgtgtgtgtgtgtgtgtgtgtgtatgtgtggtgtcacaggctgtgtgtgtatatggtgtcacaggctgtgtgtatgtttggtgtcacacactatgtgggtgtgtatgtgtggtgtcacatgctgtgtgtttgtgtctgcatggtgtcgtgtgtgtgtgtgtgtgtgtgtgtgtgtgtgtgtgtgtgtaggtctatgctctacacactttctgtgcttttctagtcagctatagaatggtgggtttagcaatgaggggatgagcaggagttttttttaaagatatagagtacagggaagacaatggaaagaaagataatttcaatattactcagattacgatagattttgtgatttcatagattcagagagcattttcttgtttgttttttttcttgttcctattattctattttactataatcttcaaaaaaccaaaaacatttggttagagaatcatgaagtatagctcagagagtgggcatcaggcatgcagtacaggttagcagtgtatctgtagatgtgtttttctgtgtgcatgtaaatttatgccttatgtagagctggacagaccattatagcgccaccaactatgatgatggaatggagctgttgaaggctctgaaatttcagaaaccaagactgaggatttctgatgtgggaaatgacagtgcagggtagattgcttagcgaggacaggtgtatctcagctgtcaattacagatgtgatttgatgctaagaaggaatgcatcctataaatggcttcaccttatcatgagatcttagcagacacatctctttctgatggtgacagatgtcacgttgactctagggaaaagtgtgaatcgaatggtgtttgttgtggagaatccaggtgtccattaagtcctctgcctcaagtcctcttgtcaaatatgtttccaacaattggattttatccttataatattttaatgtgtaaaacctggatagtcaaacttttagctttcctgagatatttacattttattggtgttgtggtttttctttcagacatgtaaagaaaagcctatctaacccacatagaagggcaccaacagaccaaagaaaaagttccctctaagagtttattggagtcaggcatatggctgagttagaaagcctcttttaaaggagccaagcttctgcttgcctctaacaaacagagcccactagaaaatgctgccaccaaaaagccatgattgactctgttcttttgtgtttagggtctctttttaagcttttgtcaggttttatgtggaaattcatgccaaacatttggttgccacatgtatatggaagtttctgtcctgcccagtctaacagtcatttagtcccaaataaacacacagaggcttatattaattataaactgtttggctgatggctcaggcttcttattgtctagctctgtcttaattattaacccatttttattaatctttgtatctccacatggtcttggcttgccagagaatgtccaagcatcctaccttcctggtagttatatggtgtctccctgactccacctcctacttttctatatccctgcttggatttcctgcttggctaaaccctgcctgttcattggctgaaacagctttattcatcaaccaataagagaaacacatatagcatacagaagaacatcctccatcagaaggcagcagttatgggagaaatgaggacttgtccagatcaagaggtttcagaagagaacaatattagacctgggctagaggccatttctgtgatatttgtcaactaatctgcccatgatctgctctgctcctaagaacttgactgaagctaagctaaaaagaaatgaactaatttctttggcaaagaaaatctcaggacagcataatactgaatgtgtggcatggctattagtaatggcttttatataggtccataatgaaaaggagcaggtgaaacagaaaggagttcaaaatgtgcaacttaaatcacaaaaaagcagcactaaatttactcttgtagctgaggcccattgtgaaggatataggattaacaccatcaagggaaggcctcctgttctgcactagagtaaagggcagggtgcacctcagaggaagaccccgtctagctcccatcttgtcaaaagtttgaaggagctttcttctttgagaaagtagctgaggtaaaagctgctgctaatgtccttatagggacttagagccattcaagccaaactttgtgctattatctacatggtgcttgcttcagagagcttctgaagctaggtggtgtgtggcaagggagtcctgacattaagaccctgaaagaccagtaccagcgtgtgagtctatgaatatgaagccttgattgtgttggagatggttagatgttggagaagccaacagaatataggaaatgcagccctcatatggtggggagaggagaggagagagagagccagagccagaaatacagagggagacagagagagagaaagagagcgagaaagagcactgctgtatgcagcaagggtgaagccatataaaccctacacactgggcatgaaattacaggatataggaggatttgatttttgtcctgtagagctttagccttgctttggtcaccatttccccattcctccattttggaattataaattctttaccattgtatgttggaagtatgtaatttgcttttattttaaaaaatagagtttacaattaagaaatttcttgaatctcagaagagaccttagacttttaagcagtgttcaaattgtgagagactatgggaacctttaaagttgaactaaatgcatcttgtgttataatatgataatgaagctttgggatcctgggagggaaatctagtggtttgaatgagaaatgccctccataatctctggtgtttgaaacacttggtccccagttggtagtgctatttggggaggtctaggtaattcaggcttccaggaagaagtacgtcactgaggggcaggctttgagattaaaaagccaagcctaattcccattggctctctgcttctggcttgaggttcaagatgtgaactctcatcatccagctcatgttaccacatctgctatttgctgccacactttgctacaatgatgaattcatattctctggaaaccataagccaaaagagctttctaatataagttgcgttgattatggtgtttgatgacagcaactgaaaagtagctactacactgagtgagatgtagttctttgcttctgcatgtgtttttcccatgtttcttctattatttgtggttcagctaggcatgtccatatcatttgcaaacagatggagtcagtcaacagtagacgtcaccctccaaaactgtgagttaaataaacctcttttctttataaaattccttgctaatttgttatagcaatagaaaatgaatacacagagaagaattttgagcaattatatatatataaacatatatatatatataaacatatataaatatatatataaacatatataaaataaaaataaacattttgatccaagtttcacactgaatcataccttaattatatatattacattttataaatcatctactatatattatatattatcatacatcacacacataataatttattgtgaaacttgggacaaaaaagtttgttttggggggaggggaaagggagttaggagaaagagaaggggagaaaggagaggaggacatgagggagcaggaaggttgagtcaggaagaatagaggggagcaagataagagataccataatagatggagccattatagttttaaagagaaatctgacactagggaaatgtccagagatctacaaggatgacaccaactaaaaaactaagcaatagtggataagctaccttaaatgctcttccccgataatgagtttgatgactaccttatatgccattctagagcttcatccagtagttgatgaaagcagaagcagacacccatagctaaacactaaactgaactctggaaccaagctgcagagagggaggagtgatgagcaaaggggtcaagaccaggctggtgaaagccacagaaacagctgacctgaaaaagggggagctcatggacctcagactgatagctgagaaacagcataggactgtccagaccccctgaatgtgggtgtcattgaggaggcctcagcaatctatggggcctctggtagtagatcagtatttattcctagtgtgcaaatggttattgggagccctctccacatagagggatactctcccaacctagacacacgggggagggtctacaccctgctccaaatgatatgaaagactttgaatatcccccatagaaagcctcaccctaccttggtagcagaaaggggataagataaggggatagtgggttgcaggggaggaggggagagaaagggaactgggattgacatgtaaaacaagcttgattctaatttaaataaaaaaatctgaaaaaagtttgttttccctgagtatggtattttagacatatgtaaattgctaaaataacagaattcataaattagaaatcataattgtatgtgagtgaatccaagttcagtatctgaggtcaaacagaaatgaaagaggaaagagaagtgacacttcagtgttctgatggattttaggctaagaataacttctgtgtctttgatgctgtgacttagtaaagtttctctgcatgtcatgtctggggaaatactgccagtctgagctaaattcatttgcacagaagaccctgtgctttatgacttatggtaacacacgaccaacataagaatgcatcaccttgtacctcttttcagctgtctattatctttctcttgttttttcttaactatagaattacacttctcaaaaaaagcataatttagttgttactcatgttcatttgtttagagaatctatataaatatactggtttgcacttaaaacttactgtttaaatattaattttctcctatgctaatattttcaatctaacattgaacaattccatgataaagcttgagctatgtcttaattcctctgtcccttatctttacttatatctgaacatgttttatatcataagaacagattttcttgtttgatctttatttgatcctgaaaaagaactaattgctttgtgtttggtttggtttctagaaatcttgactttgtctaaattcaggttctagtggaagtctctcatggaagctttagcccaaaaactctgtagacgggacatttataacatatcttacttggttaatgtttactttttctggggcatttttagtttcgccatttaggttcgtgaaaggtatataagttaacacccaaatcaatcactcttcctgtggtttcactaacaatgatgtagtctttatactatactgaacagctgaatgtggaatcttacaaatgctagattttgtgcagtaaagtgtcaatcttgggaaagagaaaatgtctatagatcaaaattccatctcccatagctagagatttatggtagctgttatttggtagattctgtgcctatttatcaaaagaagaatatatattttacgtgtctaggttctggtctcatcttagaagccacagacacagtcagttcctgaccagtgggtgaaacgtgggttttttttattgttagatctgagaaaacaaagcatagactctacagggttgaaacttaagatttactagagcaattgtttccaagttttcctgaaacacacatacctttgctccttcatctccagtaatctctgaagagtcctttcaaatgggaatctgttcctcatattctccgaagggattttaatcttatttgaatatctatatactttatgcttctctacaattagtcttgtactgttggcaaataacttctatatttgaataactgaacttttaagggtagagtccaaatctcatgattcttttctattagtttcttgaagagcatttacttcctgatatgaataaaactgttttttttttttttgcattgaatttttcctgcccatcttacttaactacctatcttgctgtgtgccaagcactatgctgggtattctgtaattcaaatcaattctctctctccttggaccagtagagatcaatatgaatattccccaaattatacaaaaaaagcaatattcacacaaagaacaagtcagctgtggatcaccgattggttagaacagatctatgtggattttaatatttgtgatccaaacacttcttaacattttttattgtcaagtttactttattgttcttaccatttagctattctctattgttattcttaggtgtctcttcaatttcagaccctcccaagttgcctcaatgttctaagtcacttagattctgtttttatggctcactgttttgtgatttgggaaggatgtggacattagggctctgctatatttcccagtttgttttctgtgcaagaaaactcattgtgataatgagtgtgcattttataacaatttttagttgtgagataaaagcctatattttaaaattaaatataacatgctacctatttttgagagtaactttgcccaataaaaacttctgcaatgatataaatttctaaatctgcagcatcctagattgtagccactagccattgtacctgaatggacactctgttggttaatacaatttagggcctggatttttaatttaatttaagataatttaaatgtcctttggcatgagtaactagtggatgttatgcttaatattgtaaatattatcattggcagaacttcctcagatatgttttataaataggccaaatatccttggataaatgctttgtgggaaacgtgtggtatccctctgtgttatccaccccctgttggagaatcactaaaagcccctaccatcaaataagcacatatctgcttacactgagtttacttggaattttctgatcatatttgccatggacttagggccccagtatctgtggacaacttttcaccatattctcaactttgaaagtatgcttcaataattcgtcatattaaaagattatgttatagcttcagtaagacttatttcctcctgtatttcaggggaagcatcaagatgacttaagtagggataaagggagccttctctaagctttataaaatgtgattttctccaaagagatagatcatgacattttcctcatgagcatgatactacaacatctgtgaagaaattgcccattctggaggtagtgcacgttttctgagtataggtatgactgggatgctggagccatgacctctcctcactatggcccaagaaacatgctcccttttgaaggctggttagtagcagtcaactgtgcaaccttgggagtccccattgctatcagcttctcccctaacaataacatgggaaggaatatgataacattcagttgtctttttcctttcctcttaatagacaaggtggtgatgctctggatgaaattggtctgaagtctgagagcatatctgttattggagcatttgctttaaattatgaaattcacagaggcctgtggcagaggcggctggttctgccgcaaaaggagctcgcttgtctgtgtcttgcgttctgttaaatatttcttatttcctcagaatacaccacaaggaccatttgactgtcccctctggcttctgcatcttgcttccagcatgaacagacaggtaataaccgttcagctgggccattacctcttctaaagactattatcaaaatggtcattatacataatggagatgattacaggcagcctgagagattttctagatacatctctacagtaataggtggccttttttagccttatatatctgtagggataataccagggcacagaatacatgacaaatggtgatttttagcaaaactctgtcagcttttaatgcactaattggattgtggatttaaatgacatttatgcaaaaattctcttaaattttaactcttgaaaaatatatggcacagcagtagcattccaagaacaggagtaaaaatatatagaatgcattgtccatgtttaactgtgcagtcacatatgcacggatactggcattaatgaatccttggagaacaaactcttttataatgaagtaactagtctgtagtgaaaccaatcaataagtatttatagaccttgggctacatgccagacactggtgatatggtggttagaaagagcaaaagggagggggtattagagggttagactctaatggcttggtattttttttaagtcaaattaaatatttttagatctgagaataatgccttcttgaacagcttctacttatccccagaaatctgaagtcacagttgctatcctcagtgaaaatacaaattctgcttcatgatacccaactacttgcttctctgaaagtgtttcatttgtaaaatcataacctcatagaaaatgtttaagaattttatctttctgtgtgagtgtgtgtttgtgtagtatgtgcaagtactccgtggagtccagaagagggtctttgattacctggaaatggagtggcaggtggtggtgagctgccttgtgtggaggctgggaactgaattctctgcaagagcaactagtgtctcttcagtcctccacattgtattgtgaatcccccacaataaacttttggagaatacgatttagtaggacccagtcaatttaatgggatgttaaattcttttgtatctcagtattgatgggagacacaagaaaaaagcaaaaggtggctaataatctgtcattccaaagaaaggtagtggatgctagatcatctatgcttgattgtgaagatgttataaaggcattgagctatattaactgttaccccacgttcctttttgcctgtaggaggagttgcagtggggcatccatgctcagagcttcagagggttccttcatcatgccagggtatagagaggcaggatttttattagggattgcagcttcagtgtgttcagggactatacctggggcagccttgtcaggtgatccttaactcaggtgcctgttgtctcctaggataccaagctggctggcctgtttgaataaagcattatcagtagaacattatgttaccaaacctgaggtggtcttaatatcagaggaacaaatagagtcaggaacagaagaatccccagtcattagcctctcagcaagaaggtaaactaatgaatgttctctagaagtttctccatacctgcaagggaagcaacattagaagaaagctggtgtacttccatatctgttactatctccctcctatagctgggaaacctgtggtgatatccactcattggaaatagcatcttctcaaggctttgactaagttacatgttggttcatggaccacctaaaggataggaggtggatttactgattggccccaaggtatgtacctaagcacttagatgagaataatgttctcattggcgatggaaagccagagggcttaatgtttgcactttgaataagccctgcattgactcaaagtcacttgtcctcagcctctgttatgaggttgtgttcacaaaaatgtaaactcagatttgacatgctaagtatgcattttcaagtcttcagattgaacgctcaggtacaagtaaagaaactgtctccattttccaaccagatttccagactttcctaaacacagtaacatttggtccctttcaaagaaaaccagaggggaaacttgggaactggtcagtctaaacacttgcctgttaatgaaaacaattccaaatgggaaatcaaaatatccaaaagaacagcaggctgctgagcattgacctatagtttcttcattcatacagtttctacatttcttcattctttatgtgcacactgcaagatctatgtgacccttgatcttcatggagcagccccacagaattgtctttggcaaactaggacaagagctagagaatctgtgtgttcaaaatgaatgcttcatcttctcacaagaagctagaaccttcaaaggatagaggactagctcatgcactagcatgagctaggttccctttaagaatctcctggtttcttcttatgaggggtgtctccagccaggagatctgtgtatggaatactcagcctgtatttccacatgacttagttaaggaatcaatgctctgagaggaaagactctgggagcagcccttacctagtgaatctatttccccagatgtggtgtctgtgcaaattgcagaacatgaaataatatagaaaactagacagacatagtctaattaaattaatatgtctaaactgaatttatatgaaatgattatgaagttaaaatttgtattataacgaaacaagtagaactgtaaaataataaaatattttagtagaagtcaataaagtcatctgtttgacttttaaatgactgaataaagaccaaatgtatgtttgaaatgtcatctaccatttcctttggtgtttttaggttgtaactggttacaatgagttgtaccatggaaatagtaaaaagggatattctattgcttttactaatttcggttaataaaataagtggaaatttaaagaaggttttaaagtgaaaagaaagagttctctttggaaagcattttatttctcattgttttagcatttcccttcactttataccaaataagagagtttttgaatagcacagaaatcttgtgaatcccggcgttgaaaggacataaggaactgacatgtgactcttgaatgaggaatgtaaatgttaaggacttgggttagcaagttgcatgtgtagctgagctgagaaatgccacttcctgcctttatatgctaccactggactttcaggtaccagtgatgtgtgagtattctgtatggaccacataaggggtgttctctaaagagctgtcagctgtgcatcagaaaccagtgtgtgtggaatgtatccttgacaaccagatgattctggatgggacagtggtacaataaaggaaagaacacttcacatggggatgcctcagaaacccctgctatatgaacctcttcagtcacataccatttatcccccagaaattaatgttttatagttaacattttcctatttgataaaataatatctaatttcagccttcctttttctgttccttcatcataagtgatgtcaatatcaacttccaagtcttccagagaccaggtctgtgtattacatagttccattgaagaaaggggagcctttggttggctattttgtatgcctccttttactatctgtcacccactactcccccctcccgctttttgatgacaagagctggctttctttctagtgaccgttagttaacaacctttcatcattttgaccagtatagttggtacccaccatgtttacaaggatagacacatatcttagaactgaccaacttatggtttatgcagagattaaagtttgaagctgatctgaggatttatgctgggcctattgggaagagttgcttactttttaccagagtttttgagcaggaaagttgtagaagagagactttgaatagttcccatgctttatttaatatcacctaagagtcaaagccaagtgatgagccagaaatccccaagtgtctgtatccagaaacagatgatgagatcacatgtattttacttacaagaaagaataaatgacttccccatacccttagttatttttcattaagttctatcactacatacaaagacctgcctagtaagtacttgtactcatggttaaattgctttatgtaaggatttacaaaaactgtttcattactttttaactagggaaaattcaactgtataggaaaaggaagtgtaacaggaccctagaccttagcacaactgatgcaatgtaagtgtcactattctgaccttaaaaccaagcatgtaagcccccaaatttgccaaaatgggtaggagaagtggtagtctcttctaactgggaacccttcctgcccccacacatgcagagtggttctagctatggaggcaaaggtagcatccaagggagaagtcccagtgggtacaagactgaaggttgcccctccaccctttgcaaccaatgacctgtataaatggaaaactcagaacccccattctttgaaaaatctcagactctcattggtctgcttgagacttactctcaccagcccaacctgggatgactgctgaaagctcctggccatactcttcagggctgaggagtagggcagaacctggcttgagaaaagccaccctcagcctgggtggaagatcgcttgagggctgggcaaacagaatagagtggattttcttttcttcccacctgactgggaccataacactgatcatggtaaggaggctctggacatttctcaccagggcattttaggaggtttgaaggtagctgatagaaaacccaccaatctgtctaaagtgagtgaggtaatacaagagcccccattgccaaatggttcctagaatgcctctgtgaggcataccatagaccccaatgcaccagaaaaccagagactaaaatcaatattgcttttgttatgcaatcatccctaggtattagaaagaaacttcagaagtcagaagggtttgagggtatgaataggtcccaattattggagattgctttcagggtttacaataactgtgactctataggagcaaagcagaacaaaagattgacctaagcagcagtggcagtgctcacagaccaataaaaggtatcccagagggggaagccagagacactgggaagggaagaggctagagaaggaccaatgtgcttactgtaaatataaaggaaactggaaggatgaatgtccacatcagaagagggaaggaggacattcatttgggaaaggactaacagggtcagagctccattccaggggagcataagaggtaggggcaaatctgttaaaattcctagttgactctggagtgtcccactcagtcctgatgaagccactcaggccagtgttgtctcaacagatagctggtaaaggggcagttagatagatgactctcttttcctctcagatggtagacttggaacaaggtaatatgacccacctctccttagtcatgtcagactgccctatcccctatttgggagagacttactacaataaccatagccaccacatccttcagggaggtcaccactcaccttactttgagtagtatttagtccaacccatattcttgtgacctgctccctgctggaggaatactccctccaactaagtcttgttcccaaaaaatgactctcaagctttaagatacctgtaattcctgtttctgccagttggttggcttgtttgtaggaaattgctcctgcagtcatgctaatgaaagaagctgacaagctgactgaccctggggccagggactctgtactctgtactctgtagagtcctgaggggaatccaagggagatggatatccagcacctaaataaggcattatcacatgcttcaggaccagccccatatctgattctgtaaaacttcagccatcaacctagacagcctgctgccaaacaataatccaccagagcccccacatgatggcctggaggtgaattatatagtccaatccatcatacctgacctaacaaatgccatattacaagaaatggacagagtgctatatatatggatgggagccattttgttcaaggtggaatcaggtatgctgtgtcacagtttccaccttggacatgatagtgtgggtctagtccctcagctgagggactttcacaccaagtgctgagctcaaggtgttaacctgggcacttcactggggtaagggcaaagccatcactgtatacatggatagtatgcatttgcccactggggccctctatcaagaaagggggatccccaactggactggaaaggaaataaaaaacaaacaaatctttgcccagttagaagaggtcatatggctgtaaaatgctattaaaaagggggttctctggaagttaaagaaaatgggacagcagacttggccacctggaaggcagccctgaaataagtggggccccttatttcttgtttattctgcctgaacccaaattgctccagcacccaaactacacacaagaagaaaccaagtaggcacaaagggaagatcccaagaaggaggcaattggatctaggttcttgctagatgggagacctgtactacctgctactcttgaaagacaaattatcatcagcttcctccaggccactcatgtaggggcaccccaaactgctgagttactaagttcaagatactacatctctcaactggacaatatagtcacattgtgaccaggtataccacttgtgcacaagtgaaccctcaaagaggaagaaaagccctagaaggaatctgcacctgaagaagaatcctggaggaacattgggaagtggaatttacagggatcaaacccatggttcttgggtatgagtgtttgttagtttttatagacacctctggatgggtggaagcctatcctactggaatggagacactctaactggtcaccaagaaacttctccaagagccaacttttaggtttgagttgcccctctccctggggttcaacaatggcttggcttccacatccggtttccccaaatatggcaaaggtcctaaatgttgattggaaactacattgtgcctataggataaaaagctcagtatagatagaaaggatgtataggatcttgatgggaactttagctgagtatgtccttgagactagtggaaactgggccaacgttctacccttcccctcctaagggccaagtatatcccatattgggaaggcttcaccccatttgaaattatgttgggaggtcctccccctccttcataagctaagagatgttcaatgatttctaattattccccctattaagtacttacagtctttgcaacagcctcagaggaatactcttcagatagttcaagggctgcacttttgctggtgtctgagtttgtccagcctggtgactgtatatgggtaaagaggatctaacttggagcctgtagtcaagctggaagggcacatatcctgtggtctcaccacctgtataacagtgaaggtttatggtgtcatcctgtgaatccaccatacaagctgaaagaggccaccaaggatgatagatgtgccattactgggtcctgaaaccagccaaaggtaagattgacatgggccctatgactatgattgccttattttgtctttattgtttccccatggaaaaggcccataacctctgttaattagaattaatcaaacaataagctacacttccaatactgacaactgtaagtgggaccaacctaagctcctcctagggtacctctaagagaaaggtacctgcttaatgtcaccaagattctcctagattatgtctcctatgcagattcctgtagccccacatagcaaattaactctaggaaaccttaactgagtatgtccttgagaccagtgaaaatcgggcagaccttatgctgtttgccttctaagggcccatttctaagcatatttccaagcttcagagactccttggtttgcttgcactactggcttaaccaagcgtacatcttctgaattgttttcactggaggactccccactcctttctatcctcatgtatgctatttcacaggtgttcatctataatagagaagagggaagggcccacttaatctagatcctggactttcccatgctcatcctcctcctgcccacctgtgggggcaggaaatgatcgctctgatgcaactggaacttcagccctaaaatcagtgaaagaaaattgtaaagaactcagttctcaagaagacataaatctaggccatctgaaggattctatttcctgtctggaaacccaggtagactctttacctaaggttgttctttagactcacaggggactggatgtcctctttatgagacaagaagatgtccttatggaactggaagaaacttgttgtttctatggcaaccagtcagggtaattagacaaaatttagccatggtcaggaataaccttaaaaaaaagagaaaagagacaccaagaatatgacaactggtatcaatacttattcttctggtcccctggttagctacttttggcccttcctggaccaataatccatttgcttctcgctcttacaataggactcagctgactacctaattctgtaaagcagagagtaaattccattaaattattagtgctgaggagatgatataaccctctgccccaagatgaatctaatatttgactcattcccatagaaccggcagggaaaataacaggcccccagaccttaatacaattgtcagcatgttaggggaacaattttgtcctcaaaacccagcatgtaggttccaacatttgccaaaataggaagacaggcctagtctatagtttcaggaaagcttacaaatgtactaaccttgttttgggacttctatgagttctatttcttgctagttggaatgtgataattaggatgtggttttttggtgcataaaagacaaagggctgtaatgcttgaggctacataatttggtcatgttcctcttacagccaccagccagcaataatgactttcttttcattttaagggtgtctgtgtggtggtctctggtggacctactttacaacagaataacaaaacaactttctacatattccctcaagttcccacatttgacacacattctctgtttctcttcccctttctcatttttgctggacttcatgaaagtacattttagacactataactccttaatccaaggatttcagtacaaatctactctcctacatcaattacccttatcacactccagaaaattaacaaggtaattcaataaactgtaatagttatccaaattgcatctctaagtgttttacaagtgtctaccagaataaagatcttgtcatttgcccattgacttggactattacacctttggggttttgagttctttccaatcttgaaaattttaaagtgatatcaagtttataaagaatctgagcagatagcagtaaagaaggcagtttatcttcaacttgtgtggttgtctccacattagtttgtctgatcttcttctcacttgtcctttatttagagaaaagttaataaattggaagttatatttagagtcttgagtatatggggaatcattttgagtgtgaaatgctttatttatgggcgaggtaatctcaattttagtcttttttactgtagatacccagctccttccctatttagccatgtgtgtgatagctctgtgtccatctgtattttctggccttctgtaaagatgagttttccttgtttccttgcctcttcctccttccctttctctgcacacccacactctagagcaagcaagctgaaaactttgatttgctactatttattttaacatgtctttaccttgattttggaggacttgtcactgggacttagaactctaggttggcagtagttctcttttataactttaaggttgccagtccactgccttgtggctactacagtgtttctgttgagaaatcagctgtctgaaagcagagtattttttaaatctccaaatgctcctaagatgtttttgctgttattctttattttgggtcactctcccatcgtgtatgtgcaggctgacatttcttgtatttagaaacaatcatgagagttgtagatgctccacttgggattggcaaaccccatccacactgcttcagctcatccagttctaatagctaactagactttctatcaattttgtatgattgacattttaaaaataaaaactaatgaaaatcatacccccaatataggtagcagtaatttttttgcaataatttttaaatgatctcttagactaaaggttgcagctaactcccaggaactgaagttcaagatgaagtttcaactttctcttacttcctgcaactgttgtttcctcttcccattcccccttcttattctgctgacatagaccctgttttacttagggtctctcttactgtgatgggacaccatgaccatggcaactattataaagaaaaaacatttaattgggggtggctacagtttcagagatttagtccaggtttgtcatagtgagaagcatggcaacacaccagctgatatggtgcaggagaaggggctgagagctatacatcttggtccacaggcaacaggaagtgaactgtctcactgggcatggtttgagcacataagagcttaaagcccacccttacagtaacacacttccttcaacaaggccacacctactcaattgaggccataccttctaatagtgccattctctataggccaagtattcaaacacatgagtctatggaggtcatacccattcaaactaccactgacctccaaagcacataggaaaaagcacctccttatggctcctatgttcatatttcctctctgtataaaactaaccaagccacgtgttctcctatgcctaacaaagtgccctgggaagaaattatttgccttagtgggagaaaggcccagactatgtagcattaaattgtgctagtcaggcaaggtcatgttttaggacatgtcctctggagatccaatgctttaattatgggtgttgggagactggaagatattttgagcagacaactaaagaagtatgggtgaaattgtttactgtctttggagactaggcttgtacctcattctactttgtagaagatgggctttcaagaatgtgaaattcctgttagcatttttctggaagtcatcttaaacattactgaagtgtagtaatttggatacttttttactatactgtaggatctagaaaccataaaagtattcttttggaaaaacatctataagctggtctttcccatgcatgggctgttgctctaggacttgactttattttttaacattgtttttaaaccgtgccttcctgtcttcccctctcaaaatccctgggtatatattttgaagattctttaagaattcatttcccaccatctcccttttatctgctactgcagacagcaaccctctgggtttctcattcagtgttagttatcaaagttgctgtctaagaagcatgtcatagaaattgtcttcattaagaagagactgattatacataaatgggcataattgatacaaacatattgtagacacttaaaatctgaagccattgaggtattctcgaagatgaaagttttaatttactcagaatatgagcttcacatcttcattccccatttccctctatttttttattatctttctataagacacacacacatacatacacataacacatacacacacacacaacacacatatacacaaagcacacatatagaaaacatacatatatacacataacacacacgcgcgcgcatacacacacacacacacacacacgcacgcacgcacgcacgcacgcacgcacacacacacacacacacgcacacgcacacacacacaagaatgacatctaggggaatgttcagtacatggaagactgacatcgaaaggaaatgtacaactttgttacacaaataatctgataaactagcaaatgatgtgacagactttgaaggtcccccatggaaggcctcaccctccctggggagcagaaaggggatgggatagggtgtcagtgggggacaggggaggagaggagggagagggaactgagattgacatgtgaaacaagattgtttctaatttaaataaaaaagagaggaagaaagaaaccatcaacaatagcatcaagtgttttttgcaaaggattttctattcctaattcttaaccctggaacagtcatcctggataaagagttagctttgttagaagaaaagcttacaactttttttggggggcagtggggagtacagagcttctttgtatagctgtggctgttctggaactcactctgtagaccaggctggcctcaaactcacagagatccgcctgtctctgcctctggattgctgtgattaaagacatgtaccatcactcactggctgaaatgcttgcaattttgaggttaggattttgataaaattaacacaaattaaccacattctgagactaagtggtttttatagctgtaaaagagggccatctccatccagttttctccatgcatggctgatatagctaacaatgcttctgacagggtttgttatggaacaaccagttaagagcaacctgttccctaaggaatggactgtggcttatgacttcagttatagcaacaacaacatgggttagcatgtcctaagggacttggtaaggaatattttgaaggtcctcttttgtttgggtcccaactgctactcaaggttgctgtggatcaggcctgttttactttccccatacatgctgaattcctcttatcaaaggagtattcaccaagcatcactgaatgatgtattactcatctgagtgggttggaaaacaaaatgtcttgacccagcatcttccaggagggcacagctacattagacataggtgtggcatcatttcaaaaggctgccactggtgctgtgacagccctcctctgcctggattttgtttcaacacaaatattttcaaaaattagttctttgttaaacatgttttaacattggtgaaggacaaattaaaatcaagcccatgtccatgtgcttgtacttggaggccagaggaggacacttcatgtccttctctgtcactctgtgctgtattcccttgaaacaggctctcttactgagcctggagcctggccagtacgtaggaggctctagtgaccctcccccattttcattctctacagttctgggattataaacacatagccacaagctgtcattttttcagggttctggggattcaaactcagacccacgagctttaacagcaagtggtcttaccctctgaactctcttcaggcccttaacttacatcttaattatgttttcaacaacttcatttccaaataagactactggtcattgaagacagcaaagccagaaggacagagccatttaagccctctgatatcagatacagagctacaaaatctgacgtttaccctcgtaggttccatctccttttgatctggtatttctttactatgccataattcctccatattgcaaaggtaataaatacgtgacattgtgtgttggaaatatgtgatttgcttctgattttgtgggaaattactttgaactttcaaacagtgttgagactgtgaaagactatggggacttttgaagtgggactggatgcattttctactatgacatagtcaggatcctatggggtccacagagtagaattgtggtgttttgaatgacataacccccatcaatctcaggcatttgaatgcttggtccccatctgggaaagattagtgggtatggccttgttagaggaggtgagtcattgaagcttgaggttgcaaaagcctcccagtatccctagtgtactttctctggttcctgcacgcaggttcaagatatgagctctcagccattactgacttcatgccttcactctgctgtcatggcctgtatccctatgtaacaataagtctaattaaacactatctttcataagttgtcctggttgtggtattttatcacagcaatagaaaagtaactaatacactgatagataatactttaacataatttttgatagggttaaatttgacctattacaatttgatttcatttgacaatcctgttgactctattccttctatattccttattatatcataaaattccaaatttttaattttttatattttgtttttagtagatttaatttttttattcccaactaaaaactatcttggtgagactagtttcaacactcttctaagatatatatatatatcatgatatctaagataaccgttagtgggtacatgctgtatttccctggacaatgtttttaatcactgagtagattgaagttcagctcaagaaagaggtcttttattggtactaaggccaagaaagttttacaatctgaagataaatttatcagagtgatgtgtgtcttgctggattcagagtataggtagcacagggatataggtaactagtcatcttccaactattttgagatggaaatatggtaccacaagctagattagtggtaccatttttcaaatcagttcttctcagagaaatggaagtcactatgtccatggaactaaatcttacaaacatctctgccttaagcatagtgtgcaaatatctggtgtgactcctcccttttcattatctttgtggttatctgactctttcatcattcaatatgatcttatctttgttgctttagtaaccttcttctgttagatggagtccaatattctcagctctacaggccttgctttcccatagaaaattcaagtcttggcttggtatggtagcaaaacctgtgacccagtttccccccaaagtgtctgacatctctgcgaatatagatgttgtatgatacaacctacctaaatagcaaggttttctttttattaatctcaagattctctagagattagtaaactatttgggaatgactattgcaataaacctatgtgtcctataataaaatatttgaggcagtgggaaattggggaatctgtatcaccttgcctgcctaaggcagctgattgatctaataatgagctgaatagccaatagttggtcagagaaagaataggcagggctcccaggtggcgagaataaataggaggagaagtctaggctcaagaagaactagaggaatgagaagaaaagaacaagagaagaaggaggagagaacaagggacatagctggggtaagaagctggcaaacaccaggcagctggacatggagaggcagggaaggtaagatatatagaaataagaaaagtaataagctcagaagcaaaaggttgataaacaagttaatttaagttaaaggtgctagacagaaacatgcctaagttaggctgagcattcaaaactaataataagtctccgtgtcatgatttaggcgttggtgtgtggtccaaaagaaaaagcctggtacagtggacctagtggaatcttctagtcttatcatcagactgataggtatacatgaaatcctaattttctgattctattaattgtgaaggtttgacaatgtgattttgttttgcttctgacaactttcagaagattttggcttgttgcctcacttgcatgagctttgaaaatgtttaagtaccaacttcagcatccagctccagagaattgctaggttccccatggaggtatttcttccttgaaaatgaagacctgcagataatcagaacttaagtcagaggaacagaaagtagaaccttagctaacagctcatgggggacacaatgagacaaatctcttctgtttcctatatattggtgttttggctgtgctagaaatggcactcagcactgaacacagactacctcctggaggacattgcctaatctcttgaagtgctattactcatgtgccaccatccctgagtcttgttgcaggatatctgatcacactgtggaccccgagactgtgttaactaagtaaaatcaatcttgggtcaggaggcaaagtcagcaattagttgagagaaagaagtcatagagaaccagagggagtctggaaaatggatagagagaaatagtagggagaaactttgagtgtggagctcctttttggtttggaatgttgaaagggtctctctcttgctgggtcacaggcaaaaaaggaaggtcagatagttggttcttggccttgcaagttttcactctagtatctactctcaagtgtttgttggtaaatagaacaatagagatttagtttatgctacatttggtggcattgacaggaggcagatccagaagtatcacccaggtgctgtctgagtcagtgtgtgtgtgtgtgtggggggggggcagtgactgcagagctgcagttaatagctgaaacagtagattcaggtgtagctgcagtaccagcaataaaacagagtctctcaaagttgtttcattttctatcataccagatgcttgggaacaatgaacatgataaaagcttgaaagagaattccatgaaaatgatccattgcattctttattttctatatagcaagcttcttgaacagaaactgtgaggaatgtcacaataggggctttagaggtcaaatttctaaagcaggattactggggctaagctgttcaagattatctcacatgtgtcactttccttgggcaagagcttccttctatggaccttgtggcctggtggttgaagctggacagctcacactgtacagtgtccactaagctctgatatgactcagctcctcttccctgaatgaggagtgatcatctgcagatgatgacatggttcctctccaaaatcctacaggtctgtgttctggttcagctatgggcctgaaccaggaaccttcccaaggtacaattcaactttcctctctgtcctgtagaaatcacagggtccaactggcagagaagcttgcagggcaacttacttccataggtgggctagtgttgcacaggtaatcctattctttgtgatttcaagcttcaggcaattacttgtggcttagtgcaaattcttcctaagatattcatgggatgagtagttgtactggaactgttgtgttagtatatattcattaagcctcttgtgaaagtcccaagaaagtgcacttgagggaaacatttttcaaatctgattgacagagtcaaactcagtgatgacagagaattggaatgtttcaggtcagagtcaaataatcttgaagtattttggccacccaaatagcctctatatttgaccaaatatccatccttgtggctgcgagatggtatcactttgaaatgtactaatatcagatagcaggtgaggcctgtagcagagacttttatactttgctgtaatctgataactccatgtttcaatcagtgtatttctggtttcctttgttctgttactataaaagtttcatgcaattgcttgccatgctgtaacatggagacttttgctgttttctgctgtgtaggttacactgtctggctcacaagcttctataacatctttctgccttccttaccctgtaggagtgctgggattctaagctggaactacatgttcagcttttactgaagtctgggaatctgaactcaagtcctcacttttgcatggcacacactttaagccactgaccatctccacagcccccttcatgggtttctaaggttaaaactcaaaacaccttgacagtgatgatagatatgcaggctttttgtgtagtgactgaaaaataggactcaagtctgggtctgattctcagctctgatatttacaggccatgtgaccttgggtatgcctcatagtctatttcctttggcatatcggtacttagaataccagatgctcaaagaagccaaggcttatgtatttaaagcacttgaagcaacacacggtcaactggactcattctgcaactatgccattatatctctgtgactggtctaacatcatctggtgcctatccatttttcttttcttttctttctttctttctttctttttttttttttttggttttttgagacacggtttctctgtgtagatttggagcctatcctggcactcgctctggagaccaggctggcctcaaactcacaaacatccgcctgactctgcctccagagtgctgggattaaagctgtgcaccaccaacgcccggcgtgcctatccatttttgatcattatcaaatcatcccaaactccgttcacttgttccagtaggttttgacctcacaatgtggtctttgttcttccctatatctggaaatgttcttttctgtagtctacaggtttggtaatgaatgggtctcacagattttccacagagagtaaggctgactgagaatccatcctattctcttttctattgccataataaaatacccaagagcatgcaattcacaacaaagctgaagtttatttaggccacgattatagaagcttggaagtctgagagcaaggcactggggtttattgagggagggccttcctcctctattgatagagtctaatttcatcacttcactgagatggagagtgtgtgctagccttccttccttttgatgactactaattttacagtggctccccacccccttactttatctaattacttccccaaagccttatctccaaataccaccaatatatgaatttgagggttaagtatgcaacatattacatttcagaaacatattcatctcataacatggccccagttgctgtatttgaagctatgcctagtggacttgctaaagtaccctgttcctgggagacatggcaattttctgtctggttacttcagctccagaaatctggatggtatctttgaaatgttctaagagtgcatgtggtctagaactctcttcaccagcctcccctcttttcctactgtatctgggggcagacattagttttgctccaatgaccagctcagcccttctctgttccctctgcctttcctcccaacaccgtttctccaataaaaccctcatccttaatcccatattctttctgtctttggtgatacctttttgttttattaatttccccatcattttttgggtagataaaagttaatgcatttgaacagctgacagaacagaaatggagcctgcagcctcatgggcctccttgctgtatattcagttcttaagttccctcttgtttccagagaatcggggatatacacaatgcttatgtatttgcttatttatttgattgtgcacatattgtttactcaacaagattagtctcctactgggggcagggacatgaacaactcctgcacttgactgtgctttgtggtatatcatatgagaaaaatgtgtagtgttgaattgagtgacttagagatttttcagatgagggactgggagcttgaggagataagcaactcttgaaaagtggaatatgtgtgatgcagttaagtctaaacaagacactgatgaataactgagggtaatacaaattcctagagtcttgggaaaagacatagtatatgttggccctatgtcccctactctgtggagcagttccattcctgttttgctatttaaatgggttagcttttgtcaagatgtttgttctagattgagagtcaagggaacaaagaagaggcacccagcaagtatggctatcatttaagatggttcagtttggcccagcccctttccttcctcatggtttggtaggaaggcatgactcagctaaaatgggcagagccaggcctgggtgtcagaagaagcctatggtctgccctgctcagcagttactttggtagcagagggttttacttttagaagttgcccaacccaattttaaccaaaggactacttctgtcttgttctttttttcttactttgcatggtgaaactcagaacaacaacagaactctaagttccggtttcagaaaacatgggcttttagagtgagggttgtgacaacagtgctcatggttaggtcacattgtaagttacagaaaaattgactgcaatgagccacaccaactaactaaacaaaacaccactcagtgttcagaaattgttcatgtttggagggaagttaacctaacctaccatttgagattacaaatcctaccccctccctgcaccctggctctcttcccgacaggtgtatgtccctgatgtgaagaagcaaaggtacagtgaattctgtctttagggttgctgtggctgttaccattatcttggggaagcttttcaaagacaactagcctggtaggtagccagtcatttggctccaaattacaacttgaatgtgtgtctgtgtgcaatgcccagctaggtacagagatgtgcagagagatggttacttctctgtctttctacatttttacctaacctaaacctgcagattttaatcaaagcacaagaaagactcatgcatgcaaacccagatcaagatatccaaacgagagacaaccgaaaacacagagaagcttgctggtaacttaggaacagaagaagagatgctgttcctttgcaaggattctgagcatttcaggtctaggggaagggcgcatttacttgccttcactgtcagggtgaagaaagaaagggaagaaacctgcaggggatactggagtaaaattccccttccttttaagccacaatggcttgtgtaattgtgtcacatgaatctgttgctctgtctcctactagctgctgaagtgctcaccagaacatccagggagcccttctccctcccagcccctgacacctgccagggaaatgctgcattattcatcgggagctaatggcaggtgatgagatcttttcacgctgcatccctctcagtgggtgtttatcaccctgttcaccagcagccctgctattactgaggggccagaagaacactacacactcgcttgaaagtaatgggaaacgtgcccagcttcctggactcccaagtgcagatgaaggttatcgccagggcagatgtgaaggcctgggtgggaggagggtggtcactctgaacagcttaattttggaaatccatacaaatcatgtcagagccatggtaatccatcttccttagcttctagcctttcagcagtcattgcgctgtaataatttccccaattcacctgtgatctctataaataaccagactgggggagggacgcagaggagggagagatgggtttggccaagtgtctggtgagcattacggcaaggaatttatctctgtctagtaagcaagatgttatcttctcaaaggtgggtgggcaagtgacctcacacagcaagccagcaaggggacagtcttgagcccccatctcggggctctggtgtcatttaaactggcttgacatgtcgggctggccgatattgatttatatgaaaacctgtgacaaaaacattatgcaaccatgccatgtcagaatgtgggcagcactgagggacagtctcatttgcaagtactgagtccccaagggacacccagattaggggcttctttgtcatagcatgtttgccacagataaatgcttcctgtttagttctagccctttacttactcgtttatttcataggttggggttttttgggggggggcggaggggggacttagtagtaaaaagacgtttgctgcatagtttcagggctgtcaggataggaaaagaatccaggttggaaaagttattgtggtcagtccaaactgaagggaagcaggtggggtttggttttccacattcactgtggcaggttttacccttcggctgctgtttctgcatctgtggtagggtggtttctttcatatcacaggcagtgcaacgtgtgaagcctaccaggtatatatttatatgtttcttaaggtgataaagacaggttttaatcctagaccagatactttagtaaaaagtaaaagttggaatctaaccttctattaaaaattacctctctctctctctctctctctctctctctctctctctctctctctctctctgtgtgtgtgtgtgtgtgtatgtgtgtgtgagctttcatgtgtgcaggtgtgtggaggtcagatggaagtttgccagagttgggtgtctccttctaccctttgggcccagggaccaaacttaggctgtcaggcttggcagcattggactttagtgtctacaactattttgctggctagaattgaacatttttttttttacttttgcttttattattggcaaaatagatatactatccagggtagggttactttgataacaaaatagtagtatttagagagtacttaacaattgctacatcactccttttgctgaaacttaaggtaaattaacctctttttttttgttgttttgtttttgatctgtttaggaaactaaagcagacctattctttcttcatgagacaggaaagcccaaacattctaataaatgtttcaagcttgaccttggtcaatgggtagattgttaaacagctgataaacatctagaccattgtactccattggtgcaatcttaggaagatctttagtgggactgtgttgaaaaaggtcaatgccctcaaatgagatgttacacgatcctatttatatgacatttttgaaatgatgacaaaggagaatagatagcagtgataataggggaggctcaagatgagtctcaggatagtgggagttctggatctgaattgtcatggtggatccaggaatcaatacctacggtaaaataacatgggattaaatacacacacacacacacacacacacacacacacacacacacaaaaaactgaatcagtcagtatgctgcacagtattaatagtttgcttgagaaattgtgctgtagtttggctctgcttcactattgggctctgtgaggtacatacctgcatacctgacacacatttgcatatagatttggaaaaggacaatttctcaggcaactatactttgaatgactacaaatgggaaaatgggcaatgctatcaattctagctttgtagctaatttgaagtatgttactttaatctccatcccaatgcctttactctagatatgagagagcaatgataccaatgcattttaaattggacttgatcaaccttcttttcttctgagtaacatttgtttaaattatatttcttcattatatatctcatcacaccttgctgatatgtttggctattatagataacagctctagttttcaaatgaaagatgataagatattttcaaaaggtaagataaaggggtatgaatataatcctttaaaaaacaggaaaaatttaaaatgtttactagatgaaaagatctatttttatcaagtggtttgacttttataatctccattatcttgaacatggatctgtttttatcaagtggtttggtttttataatctccattatcttgaacatagtccaagcctagaagaaaagagaaaggtcctcaaaaatcttactatccattattagagtcattgacattatatataagaactatttctccaaaagatcagactttgataacagtgtagaaaatggtcacagaattttgtttatgtgtcttggctctcagcgcatggatagcaatagggtccagatgtttagaattctgaattttccctctaatttttttgttgattttggctaactgctccctcttcccaggctttagtaccctcagaggcacattgggctttataaaatctattgcttatagactgtctggtgatttcatgaaagagtccttgtaaagttattaagtcatcagcagtgatgagtaatcagaaatactaatgatactgaataaatgaggcttaccacagtaaattgccgagtttggtgaaggtatctgaaaatagaatcctccagagaactgaccagcataccaaattcacacttgaaagaaacttcagtaatatttcaaaatgcccaccagggactgacacagtagctgctctctctatttcgtccaaatgaatattcagctccagagaactttcttactatgtgtcatcaattatacagagggctatagcagtttgaggaccacctgcacttgtacatgcttgagcaaatgcatttgcatcaaaccgaagtgagattattacatagtctagtagcatactatttccaaggctgtgacatcttttcatctccatttcatctagatagctactctctttctgcctactctgctcaagcagtccaagaccccagtctagatctgtcaaattaatatttcagaattatgaagtatgatagttatgctattaaaaattccattattttgcaaaactactgtgaccacagcagaacttctattttcttgtgtgtggagaagacagtaaaatgtgatagctaacaatgtaaggagaaatgtgtggcaggatcaaccctgatggaggaggaggctgcatatgtgagatggagggacgagccagggagagcaggttgcacaaaatctggtatgggtctgatttctttcccagcattttcattaacaatcttggtgagatcacaggatctctgtgagcctttggcttgttcgctttacaatgttgagaatgtaggctcacaggcacacaaattggcttcggattctggcttttctacttcgctgattgtgtggacgaggtatttaaaggttttatgcttcagatgtaaaatgaagatattaatagatgaattgcataagattttgagggaattaaatgaagtaacacagttaaatatacccaaatcgtcgcccatgtaataacatggctaaattagaactactgtctagggtctggttgagttagagaaaagcaagactcacaggcagaaacagtggcttcttcccctctggtacagtttctgctctcatcatccctggtagtagtggcccagcaatactctctccagagttgtgcccacacttttaactcctgggacctggagatgtgtattttatagggaaaacaactctccagttgccattaaggccttttagaaaaggggcttaccctgtcatatccccatggacccagtttaattatgtaagttcttaaaagagaactttttctggttagaagtataagactcagcagaaggggtagtcagaggcttttaaacatgtgaactttcaagcagctgctgctggctctgagttacagggatcatatgtgacaacgacagtgaaaccccagagacttagggatagctctggctgttaggttcccaattccaaaaccccacaaaagagggatctgttagctactagaagacctgggaaccagattctccaagctttcttttaagagcccagttgcagcttgatttaccttccctttgaaaccaagatctgaaaaaccagcagaaccaagcccaacttctggccacttaacaattttgagatgttaaatatgtgttgttttcagtcagtagttgccataatttcttacagctgcaatagaatgttaacatttccttccggatgtgaaggttactgatatcaagaatttcagtttcacagggatgacgtcgccagcacagagaagtgtgtttagagactaagatactatagctggaaggagactagaattaggatgtaggcaaaattaacagctaaaagcttcatctattgctttccacttccatcccttattttaaaatgcagaagcaggttatggatttgcacaaggtcaaacatctgaccggggcttctagactagaactgggccatcaaattttcacattgtttttccactcttagtcctgaccacatctagtagctgccagtcatatagtggctatgtagaatggcatgtcagtcactggtgtcaccagagcaggataactgacgtaaggttcagacagaggggagattgattttggcttatggtagtaaaacttccagtctgtggtctgttggcactgttgttatgggcctgaggtgagcttgaaacatggtagtagacatgtatgtatggtagaagagtgctccttgtggcagctagggatgaaaggggatgacttatgcccatcaaaggcatgctcacagtagctagcttcctccagccaagcccatatccttgtttacatcaccttccaatcataccatctaattagcactctattgagtgctattgagagccatcacaagtcaatcatttccctgaagccctaactaccaactaagctttgatgacataaaccatcaatggacatttcaaattcaatctgtaaaaagtaacaagactgaaggttgaacaacaatgaggagtgttttactatttgactagtgactagttttcttttttttttttctttttcaagactggattcttgaaaacccatttatttatttatgcatttatttgcagtgctgggggatcaaacctatggcttcatgcatgctagacaaacactctaccactgagctagatcaccagacttaaaaataatatttcaggcgtgagcccacataagacttcattaatcaaggttaaagcatatggaatcctcgtgtgcctgtatttttctagtgtcctgcttttgtattagctaatataggtagcaggaagcaagtgaaacatctgataaaagattgggtgaagtggctgccaagaaaatgccatgtcctattactgctcagtgcacttaaggtggtgatttacgtgcacttacaaggatgccatccagagtttgaccattgtttgaaaacaatttgccatccagcaatgcaaggagataattccactggtcagtcatgttttggtatattgtccatgaaatcaccaagcaggcaggttgctgcaccgtagaaccctcacccaagttcatacaggcaagatgtaattgcctttagacacatctgtaagatgtatggcagcaaaggataacagaggcttgatagtgctgaaaatatggctttctttttggacactattacaatcctagaagatgctaaaatcatgtagtaggtagggtattttttcttctgttgctcaagtattgatgataagaggtagaattgaagagagtccaaatacctcttgtttaagagagccatgtaaagcatgccggctggtcacttgtccagaacttaattaagatgacccatccctctcatgcaaccatttccccacatcaagttgataagaatgccagtgtatgttaattgacttgaatggtagataacagtggtctttgtgtcttgagcctgttggcatagtaccatgttgcatttgttacaggcttaaatgcaatgttcataaaaagcaaatacttggtaactatacgtgctgggggattacatcagccttttcctcaatttgaccagtccatgcattatgcatcttttctgtgccagggatgaaggggacaccaaatgattaagacagctctatagcttcaggatcttacattctgaaaacaggcatgttagattatagacattctggcttgttacacaaaaggggctataatggagtatgaggagcccataaatgaatgtatgaataagctataaatgaatgtatggtgaattccttgaaaaataattgtttattttttatattcctttatatgccaagatacatattcataatcacactttaaaacatcaattattttaaagcaaaaatctagaaacatgaatacacatgtattatattggctaattgtaggaataagatgtattctaatttttaaagtttttaaaaaattatatgtatgtatgtgttttgatttgtgtgtgtgagtgcaggtacctgaggaggccagcaaaggacaccagctgcctgttgtggatgctgggaaccatacttaactttctgcaagagcagaaatcagtcttcatccctgagacatctctctagcctcatggacttgttttacaatttaattttcaaaactaaaatgttttttttttacaagtttaaggtatgtgctaattaaaaaaagaatgaactaatatataatattggaagtaaaaattaccagtaatccattttctaaatgtaaaagctgatacttatttcttggtgcattttcttgagtgagttttcctacagatacatcttataaatacacagttgagaccatgctatgttttccatttaaggcatctctgctaatgtttatgacactgttcagagggaattatacaatatacaattgtttactgttgcaagtatagagcttgtcatgaaaagcacaacccctcctgctcattctcccttagcttctgtttcatgccccaaaggcaatttttgctgtattaggtactgttatatctatgtgatgaaacaccatggcaaaggcaagttataaaagaaggtgtttacttgggcttatggtttcagagggctagagtccataatgatggagcaaaatcttgttggtaggaatacctgagtgctcacatcttaaactgtaagcagggggcagagaacacactgggaatgacttcccccattacacacctcttccaacaaaggcacaagtattcaaacatatgagcctatggtgccattctcattcaagccaccttagtcatgtacactgatgtttctggtgcctattgaggctccttccatgaatgtaaatgttttgctcccctccctactcttcagcttacctcctgtcttgtcctgtttcccaatttataataccatttaatttcctggtatcacatcaagaggtttatctttctctttgtaagtgcaatttttagacatttggcctttaactttgtcctgaatgctgaccatcaataagtagcaatagtgtatgtggccattcacaaattcaattaaaggtgtcagattgcatttctttctctgtatatctaatgttgtaaacattttgccatttgaggaagactgttccgaatttcgaagtcaaatagatgtacttttattagagattcttgcccattttagcctggctcatgtgcactacctccctctcctgcatcccaacctcccaacaagcttctatgttttccttgtcctttaaaaagatgaaatcactcattcatttgttgtctttcttcatatatttttttttgccatattgtcaacttcacagagtaaaaactgtagccccaggtcatacatgtgcttcttccacagtgaagtcccttctagagcacactgacttcctgctgtcatctgggctgattgttcttttacccatttgtcactcctacttctgaggtcacttctgtcttgaaatcctacatcttcccatttgggtttcaacaactactattttactactcttctgactactgcttattgtaggtcttcctccttttctccttcacatctttctcctattcctcttcccttgcctttgttttattatttatttatttatttatttatttatttatttatttatttatctatggcagaaacacttgcttctggttgagctcagctgtaagtattctgaagccatacatgtctaaacatgttttctttttttttttcacctccatacttggttggtattttgttagctgtggacaattaggcccagaagcatatataaatttgaatgtatacttctctcctaatattcagaggtaccagtaagaagttcagtgccaatctgattctgtatctgtgtttttgttttgaagatgaagccatgtttttatccacacttgtagaaactatctgaaagtaaaaaagatgtatatatgtaaatggcagctcataattggaagtcctctatatttatctaaattaatgttaatggtctttagtcaaccaagtctagactcattctttttcaagggcaggttcccccagagactacaaagagcagttttgaaggttttaaatgggtataatttaacatacatgaggtcaaatagaaggaagaatggtttcatgtattagaaaacagagaattgcaattgttacctattataattcaagtttgtgatgtaaatacagagtgtgattcttttgtcaacatgcttgagacaagaagtattttaatttttattttaaatcttggactatttgcaaagacatgatgaaatggcactgaagtctacttgaatatgaagtttatttatgtctcatatatatatcttataaacatttcctgacacaattttataatagatttttaatagcaaatttacatgctatcaaaattcccatttgtggcatcatatctctacttgaaaaaagttttattttggaacatttagatttcagatattcagattggggtgctcaactgtcaatcacatactgagaggtaggctaaaagctctcacttctgtgactggaacaataatagagcatattcacaaggacactttgagcatgtctcttactgacactatgattctaccatgttctgaaatatttattggacgagattggaatcatcagtaattgtgtcttggtggcggtttgtggaaatacacttttgcagccctgagaaccatgtggttctattcagatagttatcacaaataattaaggtcaagggtatcatcggttattattttgccacagtgcattaaaataatatcctttgtctgaaagctgccgaggctgatgcagcacttcgaagccttcaggtgcattaggagagtggacgcctatgggggtggctatgcggagtgaaggatagtgcacagaattaggtgatggaattatacagaatgattgtagctttcatagtctagaatcatagggctatatatagacatctgtaggaaccaggagactaaggtaaactagttatgtctaagagcagaattttatgtgcaaggtgtatgcagtagtgtccttggttgtgcaccttttggcttcctccttttctctctgtcccctctttactaatatgtgagattcctccctggaaccttctagattgctctaaatttaaaaggcaattatggaagaaactctttttttgtttattgtcactgggctcctatattctttagatttattattatttacagagagcagataagatcaatgcacaaatccggaggaaaagaataaatggctggcgaatttcagttctgatttttgaaacatttttgtcttcttttgagaaggtgtgagatggatgatttccctcaatgcttcttggctctctcctgttgaaaagacatccatttctgacacttaacaaagtgtcttttcgtggcaagagatgtgctttcctattcctggatcctccttggaactctggactgcaaggctgccttggtgttgtggaaaaaagagtcccaagactctggctcagtgggctaaaagtggccagttgggctttcaacaaagtgactgatgttggtgccatttgtcatggtgacactctgcagagcacaggcagaggttcttcatgatgggcttacacatgcagaatcttggtgaacatctactctgacatggatctgacagcaacataattttcaaaatgttttatgaccctaggcacctctaaaacagcttcagttgtcacttctatggccccaaatcagaattagactaatatcaaggggtagggagatggcaacagcacattagcctgtcaagcaggaaaatctaaacttatagggaaggcagtacagaaactaagggaaaacacatttagttggaaacatgtactgctgggttagtatgcatagagctggaagagaactgagaaaggataagaatggtaccatcctgattgtcacagctgtttacagtttattgcatgtgtatttccacttgtcattacagctagccagcatgcaggggaatattgcctctggtttaagcacatacatggcctcaggtgaacttgctgcaggtccaaatactctaggagaccattttcactatcattgcctgctcagtacccagtctatggcctggtacatacctgataattaaaatagatgttgagtgatgcacacagtggctgagctgagcttaaatctaggttactttcatcttgctatgaagtgttgattgacttccaggaagggaaaaggtaatttagaatcacagcattgctgtagatgtcattgttaacactttgttccaaagcagtagggggccaggcttcttccccaggctagaatgctgagaaacagatctgggagtgtgagtgaggtaagggcaggcctggagatgagttcagtggagaatgaggcttgtgcgttgagataactggggagaaaaaaatcatgtctaaagcttagaagttcaagcataatgagtcaggagagagtaatggtgaggtcatgtcttctaatgtgagcatgatcaccctgagacctagggaggcattctggttgaagtcaccttgacttggagtctgtttactctagagcagcagttcttattcattgtacaactcagtcttggtgggaaattgctttcactttactcacatggaaatcagccaagtaaaatgcaattcatcacttcatttgagtcttgtccagtatctagtggagaagccagtgtgtagcacacacatcattgatactatgccaggtgagaggggagtttgcagtggggatgcttggccaaatgcagatgaggagggtgggccctggtgagcacagcctgtactgtggttacacagggaggggagtgtggagcatgtgacatgaccaagtgcactgtatgctagcaagtaggtaagggcccgacttctactggactgatgtcctttgagagagtttgaactgaatattcaaagaaaaaaagccactgataaaatctctgcaggggagttgctttggataaacacattttcccaaagagcactcaaaattgcttagaattatttatgttgtggagagtttcttgaaactcttcatgtcatacacataccatattgcaaagaagcattcctgatgagaagtgtctgaatacacaagccattctacatgaaagggggcaatgcaggtaattaacatggctagtgctagatgcataagggtattattcccttagtccctcagagcagggcttttaatccgtttgtaatctttctgtctttataaatcttgtaggatacatgtttcagaaacccacagtgtatacttttctacaatatggaagaagactgctttctgatccatgcaaatatcccttattgatttaaaaatccagttggacaaagtaaaaggagatatttaagatgtgcacggtgcgtgaaattacctcacattactagtaaatgcatgccttgtagcaattatgtcacttacgctcacactaattaagtgttgatgtgtgagcagtaagttgcaatgatgtcgttaactaatgtacataaatattccctttaaactgtaattgcactttgccacaatgtaaaagaaggcaagctcaaattaggaattatatagggctgttcttgagaaagtgctaacgaactctgcaaaaggagagcttggttcctgagtgttgtgtttctattcgatgggagggagggagagagaagatagggtctcagaaatataatttacaaatctgtctagaacatgtaaatgttctctttctcaaatcactggcattgtcagtgtccatggtattaactgaaggagctgatgacaacatacattatcccctgcagagagacattgtgctctgtttctgtcccaagggttagctgctctttgggacattagtggtggtgagtccttttgctgacggcaagatttatggggctcaacattaatgtgattttatgttgaactcttaaatgcctgtctgtttcccagaaaataaagacagggaagagagagacctgaagttcagaatgttgtctgagcagagctaagctcacacagtgtgatgagacatccctggattggagtcaggaagacagagttgggtagctgggcatccaagatctctggggacacattcttttcattttgtgactaatataacttctctccaaaagtaggaggacaacttgctaaaaatattttttcctttaccaagaatataagtagtcccttacagagctcagaatgaagtttgttgacatattaaaaaggaagccaagacagaaaatagatgccataaagcagaaacagaaaaaaaaaagggtgggggagtgaggctccatgtgaggagaggagagacaggtcagttcagaagggagggggagggacaaataacagcaagactgtttgataaagcctcaaggatattgccattttatatttatccagaatttgatacaatacatagagtaagggagttatgccagtaggactaatagtgcttcccacgagaacaatagattggaaaaaaccaaaaccaaaaccaaaaaaccttcagtatcaggcataagtaacctccttttgaatattgtcaggattgtccaagtgattccaaagcaatattgactatggctgctccctttagttgcctctcagaggctgaagttaaacccatattgcttaaccacacacttaagacacaggaatctgattatttgagatgtatctaacctgataccctccttcctgtgggctagcttacatggtaccagaaaatctatgcaagcaaccaagagagggaagccattaatatctctatgtagccgtgacccctatgaacaacaacagtgaacatcttgctaagatatccgtaaaggtgcatgcattcagtacccctcacaatacgatggtaaccaatagctgtcgaattggacttaaagtccactcaatataagggaaaccatacttggttctagaaacatagtcaacttttggagctagtgaggtcatgaaccttagaggagactctgttactgccacttgctaagccagcacagttcctaactaaattctagatactatcctcacacccacaggtaagtgtagctaccacccctcaccaccaaagcctctctttgcagcaaatggagatcatcacagaaaaccacaactggacccaatgaaaagatcaatggatcatagtgatacatctacaacatagctcctgcaactatggctcggagaacataatggaaaaggaatagaaagattgtaagagctggaacactaggaagtctgctgtgaaccagtatgtcctagaaatggctgcacaaacaagatctgaataatatcaatatcaatatcaatatcaatagacatagtaacatggaaaggggaaaatctcactaggtcacacccctggacaatgagttataagcaactgattgcacccacatcatttaccattttgaaaaaaaaaaaaaaacttgccagtagaaaactagactggaagtgcatttgagagctctgaagccaatgttaagtgtcacagatctcagctgctttggggacatctctatccatgccgttcagcaataagacacatagacagtaaattttggggtcatttacatcttaggtactagaatggcttagatacctgttccctctcaaactcatgctgaaatgtaattgctgttgtgttcaaagatggaaacactgagaggcaattgggtcaatatatggctctccttcaatgatggatggatgccatcattaggggctgagtttattttcctttcttttccttaatacttctttgttgtctactttgtggtgttttccagtaggttctgacataataagaagccatcttgctcccaagatgccagcactttgatgttggaattctcaacttcaaaaactgtgagacagtgcattttggttctttaaaaattacccagtctgaagcattctgctataccagcacaaaatggactatatagatatatgttcttcctgtttatataaagccctctttaagcaaagcttatatttttcaataaattgtttggattccctattaaacaaaaaggaagggagaagataaaatagaaactgaaatatttacagaagttcaagggaggctgtgttgatctgattattatttttttcaataaaaaatcagaagtcagatatctggttaaaaacctgaatgatcagagaagccaagaagccgccagtcacttcctctctcttcagtgcctctatccaaaaggtttgcgatcctctctaagccccacctttcttcttcctcagtcctccacctttttagacctctcaagtcgaagtgagacttcgactggtggccaggacctgtgtcaggtgtttccaggttcttagtgtcttattcaaacatgaactaaaaagctcacacagattggaaagtagcaggggggttttattcaaaggtaagtgatagatgggaaaagcataaactagaaagattgacaatggaccacatgagtgaagattcctaaaggacctgatcatcattttggtgcttccttttacagggtctaagagaaggaggagtttgatcactaggtgtacatcttgggtagtgctgtattttgatgggtaaccatttctctgttgttcatgtcccttcccataatgcatttatttgactttagtcatatacacatccagtaaaacatatgtaaataggatatttcctttaggagttcatgtggaggcagttttgtcttattgtacatacgcccaaacccagtctaggctggagtacccctcccatcttcacacccatacatagacagagtacagttgaagagaatatggttaagtttggtggttgttagggaaagagaaatgtattccattgctcagagaagagtgaacttacagtttgatgaaagttggagtgctatgttacccacaggttgataggtgcattgcttggaggtgtgtgtgtatatgtgtatgtgtgtgtttctgtaggtcaccgaatatactattagaagaggtgtgtgtgcacaaaccagaacaagtgaagtcctagtttactaaactattccctatgctcgcctgccttaagactatatgtagggagacactgtagcagctcctaggagacggggctacagtgtctccctaacttagaagatgctacacccccattccccattattgtctattaggatactgcaagcctagttagaaataactttcttatcgtttagagttgggattggaaggaggtgttcaagttggacaccctttccacatgactctaaggcttagccggaatagacatagttaggatgtgcaatagcagattattgtatcttcttgtatttcacctttatgattgttaattttggatgttttacactattaagttttaatcctcatttagactaaaaggggaattgtagggagacactgtagctccgcctcctaggagatggttataggtgtgcttgactatgctgtgagggtgtggtaaggggaggttcaggatgatgcatggggaattcttttttttattattcttttattagttcaaattaggaacaagcttgcttcacatgtcaatcccttctccctctccctctcccttcccctccaacatcccatctgcccctatccatcccccctctactccccaggcagggtaaggccctcaaaaggggctctccaaagtctaccacaccatcctaggccaggcctaggcccttccccatgtgtccaggacaagagagcatcccttcacatgggatgggctctcaaaatcccttcatttttttaaagaccttacatatttaatatagtgcgttacccctgtacaaatggaaaaaaaaataagttcaacatttctagaccaatatagctgttaatttttgtacaatgccaactcaacacggtaaactgggatacttttttccaaagttgagagcacagctaaagtttccaaaaatcaatttatatatgtatatatatatttatatagaaagtccaataatagcagtatgttatgcatcaatagcagcaacagcttttccagattctgcagtcatttgaacaaaattgtagagacatctagcacactccattaaaaaaaaaaaaggaaaaaacaaaatcccagaaaacagcacagttctgtttctcttgtggtacctggcaccatttttttttttaaattggcttctcaatcatcatctggaaggaaactattctgagcaacatcattaaaaatagctctgataaagcatggtcactactatgtatcataaagtaggtccacatatgagtgagtacataccatgtttgtctttttgtgattgggttaccccgctcagaatggtttcttcgagttccatccattttcctgcaaatttcaagattccattgtttttttttctgctgggtagtactccactgtgtaaatgtaccacattttctctatccattctttggttgaggggcatctaggctgcttccagtttctggctattacaaataatgctgctatgaacatggttgaacagatgtctttgttatatgaatgtgcttcttttggggatatgcctaagagtggaattgctggatcttgtggtagacagatttccattttcttgaggaattgccataatgatttccaaagtggctgtacaagttggcactcccaccagcagtggaggagtgttcctctttctctgcatcctccagcataaactgtcattggtattttttattttagccattctgacaggagtaagatggtatctcagagttgttttgattttcatttgcatggggaattcttaaggagaggacagaagtgggagcattctctttctgggctccctagtctgctgcctgagggcactctctccggcttgttttggctggtgtttatctgaataaagacatccatatatcaatacctataactgttaatagcaatcattacaagatttagcaaaggaattaagagagattactgaattctttcttgttcttcaataacaagttacaactgaagtttagtatctttgggggacaagtaatgggagttgagggtagaaggtctcactgtgcaacccagactacatcttactgactgtatttacttacaatggactgtgggagtatgcattctcgaaggacaccattattgtttgtggcttctaataaacttgggattcgttgagttaaagttaaatgagggaaggattcaaatctttgggactgaatcaaagctgtgaattaatactgtgaacttaatggttgatctgcggaagggtttgtaacattggtggcacatgcttccaacatgagtgaaaaactggttcttacgttccctcaaaagtttatataaaggaacccttcatttcctgttatcgataataattattggagacgtctcccatgtatgaaacctgagataagcctttccatattcttacacagaaatgacactcatcacttaatgtaatttgatccatagctatatgccaggctttgtttttaagtggcttgaaagctagtaggagagttggcactgaacaaaagttaagggtggaaacaaatgctgaaatcggccatagcacatggggacaggatggagataaaacccacttgtcctggtgatttcacagcatctcccttaagctaaattgtaaaaggtgggctgtgatctgtgaggccatgatccaggtaaaaagattcaaggcagaggaaaaaccagagctgtttaacaggatccccagggcactatgagtaattcatggtgagctgaggagtgatgagtctttctcctccttccacccttcactctctctctggctcttctggtgcctgctgtgcactgaagtcaggatgacagatgggaccttgggaagtacagttcaagttgacaaaagactcagcattttaaacacaataactctgctgcaggtagggaaaggaagagttgaattgttaaaagatatttaaccttaagaccagtttgcatgaaacttcctatttctctccatagaaatataaacacctataacttctaggccccagccaactcataagaaggaattaaatgctaacagcatctcttgagatccagggataaaatgtcagtggcagagtgtaggagaaatcatttatatataatagtggttcatttggagagagacaagagaagatgcaagcagaggatagccaggtgatgggatgaggtctacacaataagcagagtttattggctcaggtagtaacccaaatgttcataattttctcaataatttaacttgatttttctgaataataacttagcccccattacctacatagctattggatttatccctagtctgactttactgtaatgacaagtagcttcatcaggactggactataatcttccttctgcacagttagtgaaggagactggtatgtcttcctaaacatgggggcatcttcaattgtgtgcctgcatctgaagaattcttgggtttgggatagtgcagtaggtggcataaattagatgggcaattatccttcatggaagcagttaccatgactagagggatgctcagaccttgtttgccttaggtctatctaatcctcctacagtcttaaggtgcctgttgtttgacagtaacaaagaaaaagaaagaaaagaaaaattaaacacttgaagtcaaagatcttcaagaaaccacaatatctgcctcctatgaaccaatgtgataaccccaaattctggaccaaggacttcagggctattgaagatccagactcctttttcctgtggacagaaactaagaattaaatccaagcaattccttgtgttgcttctagactacctcagcttgattcaggtacttataacagtaaggacaatatcatctggtcttgcatgctatacttggagttacaactgaataataggtgagaagaagatgggtacttattaaggaatttagcagttatcctaaagaatttgaaatataattggaagaattttgaatttctgaattttgaattatgaatcagagaccatactgatttttttactttgcttgtttcttttaaataaggcatacagtttgaaacaattacttgtgtaatgtatcagacagacagaaatgaaagagaggtttgagttatttaatataggagtgtgaaataaagcattttcagttgtgatggagataagggtttatgtgaaaaattttaaggcactatctaaggacttaataagccagaaatgggaagggtaggttgctctggggagagaatgagactctgtgctgaatgattggttgggaaggtaatggaaccatgaaacttatttttgaggtgaaagtagtaattatagaatactcatttcctggcccaatactggaacagtagtgatgtctgctttaaaacaaaacaaaacaaaataacaaataaacaaaaacccctgttgatttgttatggtgaaagtcaacaaagccgggatatgaatgtagaaagatggtggaatggtctcatttctacccagccatcagtgaataatagaatggtgacattcttgttctctccttagatgggagaaagtctgaataatattctcttctcctatgttgttcatttaagcaaggttctagttattggtagggtttaatatttgaaaaatagagagacactgttgaaaacatggctcccattattgaaaagttctaacactcctaaatctgagtctgaaaggagactgcatatatttgaaaatgtaaaggttaatgttgctagggacatttttcttttcttctttattagttttgaatgcaacatggtagatggaattgaatcagcgatttatagctgattttgatttaatagtttcttccctaggtaaagaaggtaaatttgattgatattgcttacatagagcaaaatgagctagaaattaaatacacttgagatacccacttttgaggatggtagggtagctcttttatgcttagccctgctgtgtgacataactatatacttcttttgtgggcagttggagtgttgtctgattgaacaaaggtctcttcttgtttcataatatagggcagaattactttgctgacaggagtcatttggaaaaccatggcatttataattcaccaatgttcttggccttatgccacagtgtaggaggtaaatgcaggggtatgagtgaatgcctagagtatgtttaatacttttcctgtgtggaacgttctagtgtagtgtggaaaatgactgaaaagatctgttcctcttcattgttcttaccaccaagtctgccttcttctccagggatctcgggcacaaaaaggctcaacaaacttccattcttgggagacctcacttctcttcttatacatggaatgacaatatatttttccccctgcatcactcactggtaatgttttcactacccttcagtccaaattaaggtggccagggctatatgccttttcctgacctggctctggcttttttatctactttatcctttgctctttccatcaatttcctctctcacccccttctttgtgttgttttttgaagaaaaagaataaaagagacatgttaaccaatttattatatggcccggcaaagtagggagactaagaaagaagaggaacaggggtaatggctgaccgaaatggctggtcaccatagagaggcagagagagcatgtaggtgagagagagcaaagaggagagagaaagagtaaaagagagcgagcagcagggaagttgggacttttaaagggaagactgcatatgcgtactgagtttccacgcatgcccagagtcctcaggcaggcggtaatgcttggcggatgacatgttaatgatgtagcatgttttcctgtacttgccggactgttgtcagggggtggggtctgtctcttaaagagatattgtcgatcagcattaaagcctaaacctttcactttgtactgcagacacagtgttctaatgtgattgcagctctgtgaggacatactgccatgactcccttcatattttcttgccctagccatttctgtctaatgttcttgctgaccacttgagtttctatcacccccaagttattaaacacgtctccctgtcctcaaaacactcaggaccaagcccatgttgtctgagagaaagtaggggtaagatgactagatacctgaggtttcctcttccccatggatgatggggagtcagtaatggctctgattttatggatggggaaactgagtcacaaaggattaaaattatttttctaaagtgacaaataactcagagctgggaaaagaaccaagacaatctctcacccccccaaaccagggtgatcagaatgttaggtggtcccttgcctttctttaccttgagtgactctaggttcgcaggtttactaacactttacagaaggattacagggaacagaaagtgacatcttaaacactaccaggatcttaaaaaataaagaaactactaggcagatatatagatatatgttcgcagacacttgtcctttgattcctgcttcctgtcttgtcccttctttgcacttctacctatctggctgatttgtgtcattcccccttcctactgctaggaagagaagtacagcgagttccataccccccttgctcctctctttactcacctccaaataagttgcccattttggttatttttggctgaaaagaaaaaaaactactttcaacttcagtgggttaaaataacattttgtccttttccatatcattttaaaagttagaaacttggattagttttgcttatgtatacataagtataataccacttgggtacagatgcccaactgaggccagaaaagggtgtcaggttccttggacctggagttacaggaagttgtgagctgcctgttgtaggtgtgggaattgaatgcaggtcccctgaaagatcagcaaatactctcaaaaactaagcctctccagctccaaagatagaactttagacattgccatgctgcagttccactttatttgggtctcgagcacatggtggcattgagctgaagaaagggctagtgtggctggaagatcttcctgctcaccctgagggaaggctgcccaccactcctctcctcccaacctcagcctcttaaaaggacaggcagccttccctcaaggatcactccttcagtctgagcattggtagaggtgagaactctccagtagcttgactgctttgcttctttgatcttcagctttaattctaatatctgtctgtagatttttattattcatgctacagcagggtaaaaaagcaaacaagaagattaagtatagatagtcccaataagacattatgagacaaggaaactccaaagatgttgaattcattttctgttggctgtcttctgctggatatggggcctacccttaagagtagttaattaattaactaattaattaattaattaatatttggtttttcgagacagggtttctctatgtagctttggaacctattctggcactcgctctggagaccaggctggcctcgaactcacagagatctgcctgcctctgcctccggagtgctgggattaaaggcatgtgccaccaacgcccagtgagagtagtttattttttaactgagactcctttggagaaaactaacttttcatttgaaagtggctatcagttggagatagcttctgggttagggatggaggcatgtgtccacttctccttttagctgtaggatctcatccggtgcagaactgtgcgcgtatgctgcttcagtctcagtgagttcatatgtgcactgaaccttttgatttagaaggccttgtttccttggtgttctttatctcttttgactcttacactctttttacgccattctgtagggttccatggactctgaggtgggatttgatgaagacagacatctctagagtctctcactcttttaatattatctggctatgggtctctgtatttgttcccatgtgttacaggaggaagcttctctgctgatgaccaagaaaggtgctgatctatgagtacagtagaatgtcattagtaattgtcattttattgacatgttctttcagtatagtatttggttttatcttagatctttggtctatctagtctcaggttctgggtcactcacacagtgtcaggtatgggttctatctcatgtagtgggacatcagtcaaaatatatatatttgttcattactaatacaaggtttgtaccaccaccattttaccggcatatcttacagtagaataccattatagatcaaaggttttatagctgggttggtgtttacctttattctttggtagcatgccaaatacctttccctactaaagacactagaatgaaggggtaaagattatatgtaggcacaagctcaactttcccatgttaaatgaacaatgtatgtgttgtcttcattagtaggaccttgacaacagcctgggttgtttggaggttcccatgggatccctttggccaacaactcattagatgtaattcattcccaattcgggaagcttcatttggtgacaagagatgtccagttgggatgttgtctccctgttatttggtaatttaatttccatcacttttatatatgtatgtattttatgaggcttctataatattagtttcccatactacaccccaaatagccattgattttaggtgtctcttcccatatttctttttcttcctcttctctacttctcacttcattctcctgttccagtccccccaccccatgtccatcacaactatctattctgtttctatttattaatgagatatatctgtttcctctactcccttactctattcctaacctctgtagttctatggatcatagcttgattgacttagcagttaatatccacatataagtgagaatatatatcctatttgtctttcaaggactgggctacctcactcaggatgactttttcctaattccatacattcaccaccaaattccatgatttcacttttaatggctgagtaatgttccattgtataaatgtaccacatttcctttatccattcatctgttgatacatatctaggttgtttccaattcctggctattatgaatagagcagcaatgaacatggttgaacaagtgtctctgtggtatgataaagcatccctcggctatatgcccaagagtggtataactgaatatttaggtagatcaattcccatctccctgaataactaccacactgatttccatagtggctgtacaagtttattcttctagcttttgaaaatccaagtagctcttgtttagtagaaacttgaaactgcttgtttcttaaaacctggaaactggctgctgccacttttattcagttctaatgatctacatggtcccaaagtcttttcccatccagaaagaaggctcacagataccaaatattagatgaagtgccatctctgatgaatttttttttgcagcaaaggtggaggatgcagtatggagtcacagacaaacacctcatgctatacttctcagagggatcctgtatcttatagttgtatcaggtgaacccccaaaagcatccatgaatatgcccagcccacactggagagctatcaggagggctgtgagacaaagtcctctcatcactcttcatagtcctcattcctaaagagaatagtggccattccttctttactaaatggacaaatgattttcaggcttctctcctatggcaaaagctgggtcataggccctctctgaaaggggatcctattctttctaaaaatgatgaaagcagtgattgtccccatcttctgtaaaattctcttaggactgaacctaccatacccattcatcacaggcttttacaattgtattgaaatctttaaaaatttcctgttcccttccattagaaggtgattttactgaaaagcaagaatttaaaacctcattttgttctgagtgataagtatcatacttcacaacaggaattcgacgtatacaatgaggtatcaaatgtctggttggaggagcaatatatatatatatatatatatatatatatatatatatatatatatttcttgacctttttagccttttgccttttgtcacttgagtgctcagttctgagaaatatgctctgttttcccctgtgactttgttactctgcattagattttgcagacagttttattatggccctatcatcactccttttatagaccactgacattacttttggttttcagtggctcccagttgctgctccaccattcctcaaggagtgtggtgcacattgaggtcattgctctgcatccatgtttccaaataaaatccagttttggggggttagttgggtcctctggacataatatttacagtgaacaagttctcagccaaagacttcctaccaaaggtgaggaactcacagaggaaagtgtagaagtctatttcttctgtttgctgaatataaggtacattaggatggtaataccagctattctctactcccagtgagtaaatctcccagtgaggtccctctcagagctctgaatgagtgcaaatgatgcgaactcagtgttgcatcctagatcttgcttatagaagatttattttactctaaaatttatgcatatttaaagccaataactgtgaccactcattttatttattgatttagtaaaactgagacttacaagattgaaattaaaacaaaacagagctatgaaattttcaacaaattcattggtggctataacatacaaattatgcagaccatcatgggagatgtgtacacttacatacccttttccctaaaaatcctccaaaagaagccatagagttagaagggaaatttaggttgtcaatccatccccatgttttattgataagaaatccaatatcccagcagaataaatgacattggagaatgccccaacctttgcttactctaatgtactcacaagatgagtgagtgagtgaatgaatgaatgaataaatggaagtgtaatatctaacttatagatattacgtaagaataaatgcaaccatgtttgtggtacactgagttagctgctgaccaaactaagctcacattgaactttcagtacacctgtgtgccatatcaaacaatcccaccaatgatgacctgtgtgaataatggtggttctgtattgttatgtcatctagtgtcaccataggtattttagtttatgaactatactcttactgtatgctcaaggatgagattactgaataacatgtttctcagaatatatctattattaagtggctgtattattagttaagattttacaaatagcaagtgcacagcagggatacaaatatgttctcttaagtccatcatttaatgcatctctgtgatttacatgtattgctttacagtctggacaagatccatctttcattaaagccttattcaaaaatataggtattaatcgccaaactaccatttgtttctaccaagtcacaacagaaacaaattaatgtttgatacaaagacaaaagcaacaaaactcaatctttttacatgcacaacttagatgcagtactaaggtaaaagttaaatacatattttaagttaagactttctaatatagacatagattaaatgtcatccatttgctctgtgaagcatcccaaatgctacaggatatgctccaggttgtaatttctgtgagatctttcacaccctctttgtgcatcagtttatagtctagctgttccagtagtggtcagcctgggccagccttttctgatgggccaggataaacgttggtactctacctggtgtacctggcccccatccagacctgggtgtcagccaggaatgctgggagactggtgaattggatgtttaccaactctctgttcttggaaagcctatcttcttatcactttatgttaaatatggatgggaagtctctcctgatctaagcttggaagtttatccagttctcaaatgcttgtgcttctttctgaagaggcttggatggaacaatattgaattagacttctatagaaccagaaacatgctggttcccaaacctacatatccgtcctctacagcattatcttgaggcaagatctgtcatgaaatttttatacgaaattattacatctacatctttgctttaaacaactttgttattatttcaagatccagttatattcactcttcagttgtaaccacgaaagcaacagtgcttatattgcttaaggctctaggaaatgatcaataggattcatatatgtgtgtgggtgtatgtatgaatgtgtgcatgacttcaggtgtgtgtgtgtgtgtgtgtgtgtgtgtgtgtgtgtgtgtgtgtgtgtgtgtgtgtgtgtgtgtgtgtatgtgcgcttatgcacatgtaggcacacatgaatgcatttttgtgtgcatgtgtatgtagagagaaagggaagaagaatgtgaataaagaattggtttgtagatgtctggagactgattggtcttaccagctgcaagtagaaaatccaggaacaacagtgtgaccccagctaatgaccaaagcccagagagtcagtagagctaatgacagttctggtctgaatgcaggcttgatgcaggaagaactatgttctaacttaaagggctggaaaaaattgtcccaactcaagataggctcaggaaatgtcccactactggtgaaaggttggcttgttaatccagttgattgaatgtccctgcttaatccccttgcagttgtgagagaagtttgctttgcatagtctaccaatttaaatgccagctcactgttttcggcacatactgaatcaactcagatcaagtgactgggggttaactgtgacctcagacagacatataagtcaatcactgtcatgctgagtggcacttggttttaacagtgtgattcattgggaaaccaagtctacattttagatactcagtagtgtggacagctaggaaatcagtgatgacaagattctagttctattctgatgtgcttatgtgcttaagttgctagtgtgtgcatacactagcaatagtaaattagggtccccaaaattgcatttctgcaggacagtggttttcaacctgtgggtcttgacacctttggggggtcaaatgaccctttcacaggggtcacatatcagatatcctgcgtatcagatattgataatatgatttatagtgatactacaattacagttatgaagtagcaacaaaaataattttatggttggtggtcactacaacataaagaactatatattaaaggctaacaacattaggaatgttgagaaccactgctgtaggagaaacacatggtttactgttttataaagtcttgtttgtagcacaaataataaaaatccagacacagatattggggttaaagctgaagatcagataagcaaagcagccagccattagggagtcctcacctctaccaatgctcagaccaaataggtgatcctgtcctcagattgcatctccttactccatctgtctccatcaaaccttaaactacaatgagttcatatctcctcctgccttatatttctctccccacccagccatatctctcctgtctctactcccctagtgctgggattaaaggtgtgtcattccaagttctagaatcaaaggtgtgaattctgtctctcttttagactgattcagtctcatgtagcccagggtggtcttgaactcacagacatccatttgcttctgtctcccatgtgctgggattaaaggtgtggccaccactgcctgtcctcctctatggttgtggctagctgtctttgcactctgatctgcaggcaagctttattagagcataaacaagttatcaccatgactgttgatggtttcaaatattcaatgtagattttgaaatgtatcccccatagattagggatgactactgcattcttattaactgatcaccatgatatacaaacatcttgtgaacccagtccttttacctacctgtctatgcatcatgtgatcaatagatgcttacttgagtctcataatttcaaccctattatcttttattgttctgcattgaattgctaaattcttcctattgtttcttgtgttaattataggaaaaaatatttttatgtgtagaatttcctttagttttattttaaattatttaatcttctctcacattacagttatagtacctgttatctctttatctctaatagtattttgaatttgtactgaatagacatccctattgaaaatatcatgaggatttaattttgactctcatgttgtcttctgattactgtctaaacatggcttctgtttcctctgtatgaaaatttggatgggaggccagtgagacagttccagagcttagagtgcttgctgctaagcctgacaattcccatctctcagctatctttctcatattagtcctttgtccccttagatggttttacatcaattttcataagatgtatacataaatatatgtgtatatgatttttgtgtagcttatacaatctaagaactgcaaatgagagaaagcatataatatttgtatttcttagagtggttttactcaattaacatcatctttatttgtatctgttttccttcaaatgacattattttattcttcattacaactgaagaaaatctatgtgtgtgtgtatgtatatatatgtatgtatgtacatatatatcattgtatttatccatacctttgttactggacacctaagttggttctgtaactcagctactatgaatagaattacagtgaacactgttgtgcatgtgtctctgtaaagtgttgacttggagtccttcaggtaaatacacagcagtagagtggctgggtcattaccttttgctcacatcctcaccagaagttgttgtatctgttttcctaattattgttgttctcactggggtaaaatggactctcaatgtgggtttaattttgcatttctttaatgcctggtgatctttagtaattttcatgtttgttggccatttaagtttcattctttgagaactatctgttcattagctcatttgttgattgagttggactttttgttgttatttagctttttaaattctttatatgttcacattattaaacctctgtctgatatgtagtttgcaaagctgtctttattcagtttcttttgccgtacaggggccctctaatttcatgagttcccctttgacagttgttggccttatttcctgatgtggtccaccaaggctgccttaaacttgagagtttgagactgagtaagtactcagtgtacatggatgatgatgcctcagctgtcccaacctgacatcaaagacccgaatgattcttggagaactgctggtcttcagtccacattggaaagctccaaaaagatgagttctgatgttggctaagaatggtaaggtaacaacagcatcagtgtgcgggagacaaggcaaagattttccccttgaaccttctactcctcctggctatccttgctaaagcctctcccatgcccccactctcaaatgaatagcctcctttcactttgataattattgtgggtatgtacacacatatacttacatatacatgtgacatactgaacctcttttgttattatgtgttattatgtatatggtttcatagctgtccactctgcattgaaaactatcaaggggactcatccttgataattctccttctctcagtccccattaatttcctgtagttgtttctctaggtgatggtaccccactaaattttccttctcccttgttaacaatcctattgatgctgcctttttctggtcgtatttatgcagccatttctaggaaagactgtttcacagcagacttcctggtattctggctctgaccattttccctccccttcttctatgatgttccttgaatagatgcaggattgtgacatagatgttatctgttggccttgggctcttcataaactcttgatctctgcattatgtccaattgtggctttttgtgatggttttatttgctgtaaagagaggtttctttgatgaggggttgtagcagcagttatctgtgggtataagaataacatttagtatgtagtaaggaattatgctggtccagcaaagtggtgggagtagaatcttttctaatgtccatggcctcactagccccagggaactggctgtatttccaatagtttccctcttgttgagtgggctttaagtccagttgcacagcttttgtttgccactgttgtgtgtgggctgctacttgcatcttgtgcatatcttcccatggtagtagttgtcctggttcataggtgttgccactgggtaggacttttattgctcgctctcttggcagcttctctcggacctcttaatacccgggctatcattagaagattttcacattcagggcaggttttctacttcaattacactaaagaaaatccttcatatgtgggcccagagtttgtctcttagttgattccagatccactcaacctagattaaccattaacaataatttgcaagtctttgtatcatcctttattatgaagttgttcttccccctattatgttgtgagaaacataagtgacattttttgatttggtgcttagtgtttcagtcccttttcccattctttcactgttcctttgtgaccaaaatttttggtgtcaaactctagtttttttttgggggggggcaagggaatgaagtttgtaggcttccatggcaagagaacacagtctgtgggctgtcatggtgtgggacatgagagaggacatggcaatcataccatgttagctgtgtggctgtctttagtttctggtctgtgggaatcgtgatccagagagagtaaagggaagccagtgtgaagagggtatgattaatttttgtttctagacaatccttaggtgacactttcctagacccaaagctgtagtaacattctcttcttcctatggtgattctacttataggggaaattgaaagggcactttaacagcttatctttggcttgtccatttacttgaacatttgaaattcagtttctttatcagcaaagtacacacacacacacacacacacacacacacacacacacacacacacacgtatatagtagagtttgcaagattcttttgaggataaaatgtggtttgagaaagtacctgaaaagaacttaatagatagcccatggcatgctgacctccctatcaacaagtgccataatttattagagagctgggagtgaagctcagtggtagagtaccaactgagaaaacaggaagcccttagagttctaacccctgcactggaactgaaagagagaaagatatattacatagttttagtattgatatgcctaatatttagtaggtaggaaaacatttggaataatataataatataatattaacacatcctcaacacacattatcataaacttgaaaatgttacatgctcagagcctattataagtcagatttccattgtgcaattacaatttttcttttcaagacagggtttctctgtggctttggaggccatcctggaactagctcttgtagaccaggctggtcttgaactcacatagatccacctgcctctgcctctccagtgctggggttaaaggcatgtgccactactgcctgacaacaattaaaaatattttgttacatttattcattacctttttcttttgcaccctggtgtgcatctgaggtcaaagaacacatttcaggagctgttctccttccaccttgtgggtccagggcattgaactcaggtcatcaactttggcagttagcacctttatcttctgggccatcttaagggttctgcacttttcttttttgagacagggcctcactatggatccctggctgtcctggaactcattgtgtacatttcctttatgtggaacattacgaatgctgcatctggagtggattacatctttaagagactacagtctactatttatacacaagtcagtatgaacaaaattgcattgtgttgtaataaaagaaccctctcgactagaacagaagtgttgtttccacaacactgggggaggctaaacaaagcactcgggagaagccgcacagtgttatgtgagcagttcccattgttttcctttttgtactgtactgttttaccactggcagtcagtgtggggccttcacttatggaaatagagctgctggcagtttaggctcaatttcactctcaagctgtcataagtgatcacgtgggaagataatacttggtgggaactttgttttcttttgctgtttttttttttttttgtattttttccatttatttttctgtgaggcaatttgttagaaaagacagcaaatgaaattgagatctacagtatacaataatgcctggaaaacatgcaaacttccttagaaactctcctgacataggaaaatggtggtgcagagccctaaatgcatgcaagctctggtagccactcgatctgtttcttatcattattatctccatgggctttaagcagggttcacacaaaaaaaccatgctccctatctttctgtgctagaaatacctctggttctctgggcccattttaaataaggattgccttcaagtatgctgttttaatacattcattgtatattgagaaattataattcttttgatgtccgattttcctcgtcttttcttctctcttctgtttaggtggtcaagtgtctgtatattcatttatctttaaaacacattttacttttatttttcttaatgtatcgttttactctgtttattctttctgtcctcgtactaactttggactttgcttgtgctttttctctagttcctttaagttgagctcatccctcctctccccctccctgagtcctgctgtatagatcaggatgaatttgaactcaggatcctctggcttcagcctcctgagtagctgggttataggaatgtgctagtactccccctgcagcctgtttcttccttttggaaatatgtattgcgtgctatgaatgtccacttacaactgcttttctactctcccacagatctgcatgtgctgcacaccctctttcatttgtctcgaggccgtttaaatttctctcccccccccagcccactagttgttcagaaaaatgctatttaattcccacatatttttgtactcccccaaaattttcttgttacttatttgacaccatctgattggagaagacagttgatatggggccttgggtcagactctgggctagacaaaggggcagggtatcttcagataaagccatactgaagctcaaccatgtctctgagagtgacatgttcaagttttctggtaagctgtggcatttttgctgaggatgcagccgccaccaccaggatgttcatgttgctttagttctgctctttcctttcctttcatcaggctctaggtggactagctttgtaaagatgctggtgtttcccagacatgagagagaggtgtggcggggagggcatcaggcttcctgggtggtatctcagagtggatttgcagctttggttgtcttttcccactgttaaactgtgggctgtcgagtacaccactgtgacaccttgcaaaggcagaggaataaccaggatttatacagaacttgtctcttttaagttttattcaggtctagggtatacttacatgctctcagcttgtcttcaagttcaggagttttcacaaataccaatgtctgtgagtcacagatggctagaagatggttggacttttatgtgatgtgacagctggaacctcgtctcctgctaccttgctgaaattaatccttgttttcatacattcatgccagatgtataacctgaattcaaggaagaatgtaaccctagtttgtagcttatgggacgtacatttttaattttgttttgtttttaatcagatgtataaaaacagtagttcattattctaaaaattgcccattttgtccaacaagtcaatgctgggataaaaaaaaatcaagaagtaggcggtaactttttagatgaaagatgttaaaggaggttaaggagatgtgggtaagattgcttatccccaaacctgatgacctgacttcagttgctggaatcaacatggcagagggaaagagctgtttcccttacattgttttccgacttccattacttgcaccatggcaggtgtacctgtgtgtgtgtgtgtgtgtgtgtgtgtgtgtgtgtgtgtgtgtgtgtgtatctccacaacaattagatgaaaagcagacagtaatacttgtgtagaccccggtttgactaaatccacatattgaagtaagcataaattccacaaagtttaaactagtcaaaagcctagagctagtagattacaagccctagagagcaaagtacggttgatgttttgctatatggacttgtcatctccatatttatgtttatatttatagattaatgctgctgtcagtgtaggtcaaagaagttgctgtttgcactgggaagtggttaatgtagagaaacataactggccaagtactgagaataagaggcagtcaagtggtcgtacctcagtggcacatctaaccccaaaaggtcacctgaacattgaagaagaggatgtggagcagtgttgtgagttgctgttgtctgatcatgacatggctgtaacagttctgaacacacaatagctgtggctacccatgcaggatcaatacaaacaaacaaaatgaagcaaaaagacataaatgtaggttaggaaatggttgagaataagaagaggtcaacaggagtgagaggggacagtgggtgagaatcatcctaacacatagaatacacgtatgaaatcatcaaaagttaaaaattatcaataacattgtatatgttttggtagatatgcaaatgatgttgattatacaatatctttattacctttgttttgatatcatattgaggtaaataaggggaaatgtcatcttttctagtatttgctcaaaactacttcagtaaatctctacataaagcaaatattccaaagcattaagaaatttcaatgttggtattgagcatataggatctactgtaagtatccatgctgtatttgtatgtaggtgtgtaatttttctctgtagaaattagatgaacaaagttttcacaataccattcttaagaagacagagtacttgctatttaagataccatttagaagacatagtgtctcaaatcaagtgtcacaaaaggtaacaaacaaaccgaaggatgagactaggaagcatgtcttcaagagaagtttggacacattgctaaatatttacaggaatttgcctcattctagtctctgtttatgagtgcacttggtagcaccttttataggtgtgggtaccagagagattgatttaaaatgttccttagaaacaaaagatagttaaagagaatctagcttgacctgggtgctttagaagagagaactgttataaaggacacagtggaagtactctggcctcccggcctccatggacctctctctcttcctcactagcagtgtgagcttgagagcaaagcttgtggagagaagctcaagtgtttcctcagagaatgtcagggttaagtgaggctgtgtgtatacagttcaatatggagcatagtgagtctatgttctaggagaggagtgacaggacctctgaacagcagatttgagttgaaggacttcaataactaatgcggcagatggaagcatgccggccagctgaatttaaagatgagctgggattggatcttaattttgaaaaccagttacacaatgactgctgggttttacttaaatgtagatgaccaggagtgttgtaacagaaaaggagtatggagctttacatcatttttattgttagtttaagaagctttgtagtgcctgcactgttctttcaaggggcaatgaagagatttgacaaattggcatggtcagagttgagcttggagacaaccagtctggcagtcaagtcctgctctcttgagaaatttgaaggcaaaggtcccactgttctcctccaccaaaactctcctctttcttcaccataagatggttgttttatgggcataatgagactgcagtttagaaagtaagcagaaactgcagtaggcatggcagctatggctgcctgtaatgggaccacacaaaactggcttatcatgaagtggggagggtcttatggggccctctcccacaccactgaactgttggctactgatggattcttgggaggaggtggtcagtattttcaactgtgtgtctgtcaaggatcccaacagattatagtggatagttccaaatccatggtcaacagatgatcctagttaaattcagtgggcctcaaacaaaaaaataatcaaccacccaaaactaaaccaaaccaaaaacaacaaaaagcaagccaaagcaaaacaaaacctgcagcaacaaaaaagtcatgagtggggggagaggatggtagcagggtgggagatttgatgggccttataagaatcagaatgcatgttttatatgtatggatttgttaaagaacaaacttaatgtaagtgaagaaagaaaaagcagatacataatcaagacatttccactattcctctgaagaatgcggtggcagcatctaatcttaaccagcaaaatataagtttaattcatagattcatagtggaagtcttctaaatgttctttaagagtaagaagtacccttacttaaaagagtgcttaagaccataaagatgtacataaggaaatccaatagcattccacactgctgccatctctgggctgatgagagatgagaaagtcctttcctattttccattttccataatgctgtagatacctagtctttcataacacattgctgaattcagtctgtaactgatctaagcactgcttcagaaaagttgcaagcacgaaaagcaaatgagaagcaatgggaaggatcaacagaagtggaaaaaaacaggggatggagacacactgagattaacaactataaagaagtgttgatgagggcaggggaacaaatcaaaattaaagtttgggggtaacctataaaatggtaacactccatacactggagacagttgtaagacaggatagcttgaggcatgaagatgaaaaggagctttagatgcaagggccttgtgttcaataaagaaaagtaaaaatcccctaagaactgagctagtagtagggtcacttgcacccacagaaagaatggtagaaaggaaagattaggagagataaggcatcacctatcagatattacgaagtcaagcatacttggaaaacatgcaaccatttccttacagaaaaggcacctagaaacatgtcctgctttgctaaggccatgagcattgtgacctctgggtaaactttgtagttctgtgaatctgtgatcatctcaggcttcaaaacactttctagggtacatcaaataattcttactagtaaaacacatcttgaaacttggaacggaaactacacttttcccatatagtgttgtaataaagaaagcaactggggactccacctaagaacaaaatgtgaactgttctggttggccactcatgcaacacaaatctcaggtccacaataattcatggcatgggagatgtggctgctctggaggagttttaaatagaaatctggtggcagatgaaaaagtatcaaggacactgttcctgaactgcagggtgtgcactgaccatcaataagtgctcagaaatggtagctcagcatcagccccaccagagactgcaccttgagtgcaacctctgcatttagttgctccatgaagcctctttattatctctgggtatggaaaaatcatccaaggtctttatagtttgccaacaattagagcagtgctattagaagaaggtagcgagacacgggcactttcttgccaataaaagtttagcctaagttcccacagactcagaagtgcaattatttgggcagcttagcttctcagaggcttcaactctgggacagagagcaattattaacataaatgatttacagttcatttattgttttcttagaaactgtatttcctgcagaagcacagggccagtaaggcacacatggagcgggcaatgagtcctgtggtgtctccaggtgatgggtaggagaaatacctgaaggtcagggtctgggttatccttaaacaaaatcacgaagcccctcatgtttggtgttcagttttctgcctccccatgtggtcccccagttccttgtaactttgtgatggattcgtaccttttaaggttgaattgttattttatttcctcccatctaaagagacttagtgactatagatagaatataagccatagagctggccactttactgtcagcgtgtggccattacacccataaggttgaaaactaattcttgaatcctgctttacagatattagcttatattttaacaaattaatgctaggacatgaaatagctatttttttctgtcacaattatacttaaagtcatccatgtttgcttatatgtatccactgtacttagcttatttaaggtgaaagagaaaattccacaatataaacaaatgtatccacattttaatatccacatttaataccacaggactgtcatgatttaagaccacaatgccattctgttttgaggctgacacaatccaggccccctatatttgtttgaaattacttttaaaacatagatgcattttcttcctttcttatttctctctctctttctcttatttatttaatatatttattttacatcctgaactcagtttaccctccctccttccatttcctccctgtccacctatgatgtctattctatttccccttcacagcaagattcatgtgtccccctttgagccttccatgttacttagcttctttgtgtctctggattgtagcatggttattttttttctttatggctaatgtcaacttctaagtgaatacataccagggctttatttctgagtctgggtcacctcactcaggatgatcttttttagttccatccatttgctggcaaagttcatgatgtcattgtttttaacagatgagtaatactctattgtataaacgtaccacattttctttatccattctttggttgagggacatctaggttgtttctagattctggctattacaaataaagttgttatgaacatagttgagcaagtgtccttgtggtatggtagagtgtccctcaggtatatgcccaggattggtgtagctgggtgttgaggtacatagattcccaattatctgagaaactgccatattgatttccaaagtggctgtacaagtttgcatccccagtagcaatgcaggtatattccacttgctccaaaacctttccagcatgagctatcatttgtgttttgattttagctattaatcaataaaatagaaacaaagtgaacaatacaaagagtcaaaggaacaaaaagttggttctttgagaaaatcaacaagatggacaaatccttatccaaactaaataaaaggcagagagaatattcaacataacaaaatcagaaactaaaagggggagatggggatataacagcagacactgaggaaatccaaagcaccattagattatatttcaaagacctgtacttcataaaattggaaaatgtaaaagaaatgggcagccaaataaaccacttaaatagatatatacccctaaggaaataaaatcaatcattaaaagtctcccagaaacaacaacaaaaagcccaggtccaggcagctttattgcacaattataatagactttcaaatcagagctaataccaatacacctcaaattactctacaaaatagaaacagcaggaacactgtcaaattcatttcataaggcctcagtaactttgatacccaaaccacacaaagactcaacaaagaaagagaactacagaccaatttcccttatgaacattgatgcaaaaatactcaataaaatacttaggtttggtaatccaagaacaaaaagatcctgtactgtgatcaagtaggattcatcccagagatgcagggaaggttcaacatagaaaaatctctcaatgtaattcaccatataaacaaactgacagaaaaaagccaaccacatgattatctcattagatgctgaaaaagactaacaaaattccaacactccttcgtgacaaatgtcttggagatggcagggatacaaggaacatacctaaacataaggcaagccaacagctaaaatcaaattaaatggggagaaacttaaagcaattccactaaaatcagggacaagacaaggctgcctactctttccatatatccaatatagtatttaaaggtttagctagagcaataagatagctaaagaccaaggggatacaaactggaaagaagaagtaaaacttttgccatttgcaaatgacatgatagtttacataagtgacccaaaaaattctatcaaactcatacacccgataaacacattcagcaaagtggctcaatacaaaatgaacttaaaaaaaatccgtagcccactatatgcaagtgataagcagactgagaatgaaatcagcgaagcaacactcttcacaatagccacaaacaatataaaatatcttggtataactctaaacaggtgagtgaaagacctgtatgacaaaaacttcaagtatttgaagaaagaaattgaagaagatatcagaagatgaaaagatctcccatgctcatcaatcagtaggatcgacatagtaaaaatggcaaattaacaattcaatacaatccccattaaaatggcagcacatttttttacagtccttgaaagaactctactcaactttatatggaaaaaaaaaccaggatagctaaaacaatcatgtacaaaaaaaaaaaagaactcccaaaggtatcaccatccctgatttcaaactctactacagagctatagtaataaaaactacagggtgatggcataaaatcagatgggtggatcaatggaatctaatcaaagatccagatgtaaatctacataactatggacacctgatttctttttttaaagaagtatttttttttctatgtcctatgatcttgtcctgtcaaaagtcctggtcctccataaaagtaactgaagtacttttatggtcaacaacacattgtcattttattaaacagggcctgtttgtgtttttaaaaatgtgcatccatcacatgacgcctagcacaatgatctgcttctttggactgacatatacacccaagcagctgtaactttctcatattttagttttattaagaaaacactaacatcattttgtatacattatcttttctgtgacagacattttgtgttgccatgaggttgcaggagttttacagtcaacttttatgatgattgaataatttcccactgagttaaaatgtggctggtttgctattctcatatggtttagataattactatatttttgaccatagtaaagaagtaagaaattgatataattttccatctggaattaattgaaactcttattaaccaagccattagtatatctgctgcttgtgaaggttagggttttgtttgtttgtttttacctgctcaataatgtttgagatttgggtcaacttctctgagattttttatagctttctcctcctgatcacaatatggttacaacttcttcaaacatcacatcatcacagcactacctttaaaccagagaggacagggagggaggggaaaggggaagactttctccataacttttttcctcagaagtaaaattgcttctcaggagctcccatcctaattcacattagatgttaataaccagaaccagctattatgtttcaatattatgtttcaatatgatttatctctgcaaagaccaagactatcagaatttattagcacagcactaacacaccatggcactgtggactttaagtagtaaaacaaaactggaaacagtcaggaatttgccttgcttcttccataggacatggagaaatagagagagggggggggatgggagggagggagggagggagggagtgaagggacggagggaaggagagagagagaatgagagaatatgagatcataagtgtagaccacaggattgtaaatggaaacaagtcccaagatgacaacaagctgcagagccagaaccctgagagctagaacagccagtggtgatgtcatctagcccagggctgtgggatcaagacccaggtaaagttagtatgtcaagtcaagtccagagggaagaacaaagctgatgttccatgtccgaggtgactaggcaggagaattccctcttattctgaggactgtcaatctttttttcctctcttctggtttttttaaactcttaggtgagactcactcacattctggagggcagtatttatggttgactccctctattgatttaaatgttaattacaatcttaatcaccctcatcaaaacaccagaatgtttgatcaaaatatctgggcagccactggtctagtcactaaaatgaattaacacagaaggctacttaaaaactaatagtgtcatgtttgtgaggtagggaatgtcatataacattctgggtgttttttgttgtttgtttgtttgtttgttttttatagcaatatgttaccaagaatgaagttttgagtttgaggatagaaagggttttttgtgttttgaatatatatttctcaagactttcttcaattttttaccatttcctggttcctagtaatgttcaaacatgtgtttcctacattaaccccaggatcagtttttattaatctagatgagatattgtttattcctgcttttgatctacaggataaatgtttgtcatttctttagattgtacatttctctaagaaaagtcagaaatgtgccaagattttatagatttgatgtcatatacagaaagatgtaagcatgtgtaacttttagccttttgtttcatcttactttttaacttaaatatcattagtttttccccatagaggtgttgtagttttgttaatatgacccattttggtcttttatggtttctcttaacttttctcttcatcatgataaatatttcacctttttgtgatttaacattaattgacataataaagtaaatcgtagttttcttaatataatttggtagagactcactgaactgattgatatttcttttgttaatgtataaatttaatggactgatgacaggtactgtgtgtgtctgtgtgtgagtgtcaggctcatgccttaataaccaactgtagctatattggaatgtgttgactttggtaaataaattatggttaaatataaaggtcacaacaatgggctcaaatctcaaaggacttgtccccagaggagacataagacttctctctctaccatatgagcaaacaataaggtcttgaaagcccaaaagaggcctcagaagagcccttctacagataatgattttggacttgggttatcctcaacagtgaggcaaaaacttcctgctggggaagctgcccagacttagatgtcttgtcatggcagcctgttccactaatggtcttaactttgttagaatatttgttcttgaagtctgtaattattttcagtactatattctattagtagaagtctctgttcacacagattcatggaaacatagataataccaatgcaatacaataagtttattttataaatggacagttttaatgttatatttaattatagatataaaggtatgttttaaagcaagacttaccagttctgagttcctagctcgcatgttttgtgagccctgagcaggcagagcttaaatgccagtgtcctggttcatttgaggtaaatggggccatatgctcagcactctatagttcagagcttagggaaagggagaagagatggactcagaccccacgagagcacaggggaagagagacaaacccagggaagggcttacctctgcagttgttaccatcctcagtaaagctgagagccaaaataaactcactagcatcttgacttcatgaaacatctaagtattttcttcctaaaatttcaccagagaaagtaccttctgctaaatattttaagaatcttttaaaactatgagtgatttttaatgatttgttttagcaattaactgacttcctatggtggcaagtctctctgaaagccaaagatgagttagctgttgtcctcaacgaggcaggggagtgaaatataaatgagaacatgtcatagatattatatctgtagaattgattcttaccagtccaaattaactggacaatactgctcaagtgcagccgggttttgttttcaatagctctgagtgaacaatcaaccgattcgttggtattatatacatctatcccctgaataaacatttctcactctggaaatatagatcacaagctagtcattataatttagtatgagttcacaaaataaaacaaaaattaatatttatagttttaattcctttaaatgagcaaatattgctagatgtaagcttagaaccagttgggagatcagcctgaagccttgagctcttctgagtgcagtggagggtagagaaggctttgatgctgatgtgctcataacttcagagagtaggaatctggataaactaggtacctcataaaaaacacgccccctcgtggctctcacaaactcagaataaccttctctggactcaggataacaaccaaccttagtacaaagatagggtagggtagatttttttctcccattagaacttaaattatatttaataatgatccctgaagaaggagaaaaaacagttcatcacccaattattttaaaaatggatctaaagacaagcaggaaattagaccagccagtttgacatcaatgaaatctcagagcatttttaaaagatcaaatgctggaacatttaaaaagcacagcttgaatgcagtcaattaaagtagccttggcgtgtagctgggagattttactgctgcgtgtgttcagcatggacaacggttctcagagcattgtcataaaaattgaggaacatcggataaaagccataaaacaggatatggttatttgacatcacctctttttttttttacttaatgactaaactatggaatcctggaaggaaaaaaaaaacctgaccatttgaattcagttgaataaactatgtgtaggtaaaattaaagtttaaacacttagtgttattattcagttttgagagcaaaggatctgttctgaaagaatccactgattttaggcttttaagtgtggttcacagactcatccattcttatattttttagttgtgatcctagtctttaatggctgagccatctctccagcccaagtcatccattctctacactgacactaacaaggtagtacagaggctagtagtgtttgagatgtttataaccatgggaaagtgtgggcatggatttggtgtatcttgtttttctctatttcagccatagtgatgggttatattgtacttttacaacattttaggtctatgtcttactcagataataaaggtaatattctccagcagacagtctcggaagcactgatggagaaactgcatttaaagcctagtgtttaccacactattagaaaatactaacctatttttcctattagtgggaaaaaagccaagcatacttacctcaaacacacatggaaaatggctttcaaaaatagatacttgaagcaacccatttggttgagggattagaggagctgagaaatgtcttttgtagtaagctgctactgtctctaaggtgtgagcttaagggtagaggatgccgttgccccagttctgtaacccctgcatgttggaattgtgctcccaccctttgctgtgtgatttttgcatttctcatgactaaatgttactagatgttactgttgagctgttgaacctggccctcaccagatggcttgccctgcccgaacacagtggagtgacagtataccaggttctgaaacagagccctaaaggtgttatgcatttcatttcattcttcccatgtgatcgcagtgaagaagacatgtcctagctgcccactaccctttggaatggagcacgtagagcagagatgaaccaaacctagggtttagaacaatacagggtaaacctcagcctgaagtagtcacctgccgaagctgcaaggggtgtgttctgaaaggagcccacaaaatccgatctgcctttcctgccttttcagtattcctttacggaattctcaaccacttggcttttctactcagaaaatgcaaatgtgtcatatttacactagaggttttgattctattccatatacatccaacctaggtcacttacttgctaatgacagctgtgttctttcagcccctcggtgcgaggcctctggacctattttccattgtttctttcttccacgtgtggtgagatatgaaataagtggtgaagtatgtcctcactctggccacttctcattctctccaccactggtttcctgagaaactcccatagtcattccttactgttctatttttttcccccacaccaggcaggcgatactttagtatataaatcacatgatttccatcttctccaatatctcattgttatacagctcaatgtcacagtcagtttgttgtgctgcacaactggccctggccaagtgctctccagatgcacagtcaatgccacacctccctcacggtgctcttcccagacagtcactcgaagcacttcctgcccctttaggatctgctcaagcttggcacttactgtggcagcttccctggctctaccattatcgatcaactgctagtggccccggccccttcctacagttcccggctcaccaaccaggatattacacaattccacatttgttgccacctcatccccttgtacagaagccccctgataatggggtgccatgtcctagcattaagagcagaagaatgcacatggtagatgctaaatacaaatcttggtggaaggctgagttcagcgcccttggaaagacgatgatccttaagcctccagtttgctaagtgtgagtcgggaattcaaacgctgactgagaggacaatgtaagcaacgatttttaacaggaagttcatctcaatcagtaggtaggattatgaagtgtttgattatggagttcaaaggaataaaaggacgctttaattaccaacacttaagacatgatagttacaagcagggttttgtcttggacttttggctgtgtgtgtgtgtgtgtgtgtgtgtgtgtgtgtgtggcgtatgcacatatgtgtaagggccacccatctgctctatcactctccttatttatttgagacagggtctctcactgaacttgagagtcagcctgatagccagaaagtccaagcagggtcctttctgtctccattccacatgggtgtggggttacaggcttgactgtggacacactatctctttttctgggtgctgggaccccaactctgctttgtaaccttgcaaaggcactcttatccactgggctctcatttcttaagctctgctttgggttttctacagaaagttcaaagttcaactttgaacctggtcatatactgtgcctgtgcagagacagaggtgcgaaagagtcaggggattctagagctagaaatatgattttattttagggggaagataacacttcccccccaaaaaaaccttttgggagctgtgggaaatgaagctggccaggtaggaggtggggctgtgccacaggctgtacccactctctagcttcctggcatttcagcagcgcaccgttgggcgaagactctgtatgttatttttgcagtaaagtccctgccaagatcatgaagggagtgaaaactccaggaaatcttgtaaaagcagcaaaaatgtcatatgcttggatttccgaccagctgaggcaaagctgcagcacgtatctagacccaagcccgaggttcccatacaaaggtactgctgagctgacagaatttctaatattgtgttgaaatcagccctcccatctccagatattcatgtatttgtaccttctaatatgcagagttctataggattctatatgcctgtaatatactatataaaagtaaagataaaaggaatgctatgtttctagaaaagtaaatgtcttgattttatcctgtcttattttatgctcaatagatgtataaaaatatatcattaatatttttgattgagaaaagggacataaataatatgttaaatagctatggtgtgctagacacaattctatgagcttcatgtatgtttcctaaatgtactatatttgttttgtacatatagtctccattaaggattaggatactgtattttgaaataagtctgaattttaggagaaattgcacatatataataactgacctggatacttggaacatgcaagtactgactagttttcttagtgcccaaatgaaaggtagagtagggaaagaaaacagtgtgtggtgggggaacaataatgattaaagaaaacaaggtcaataatttatccattattcttaaaattccccaaccatttttgttgacatttaggcagcattacaatatgagtcccatataacaatatttagttagaaagatttcccctaagagactgtaattatcaatagcctcccattaattatttctttgccttttagctttgataacacagcagacaaacaatgcattcaggactcctcaacctaaggcactgactagctttagacgaatctgtaatagtgaagtatagacttcaaccttgtcagtgtgtttgtaagcccttctctgaaaccttgctggtgacatctataccactgttcattggtcccctgctgcagtaactgcacaataaatgtgtggcctttgctgccaaggcttttgcttcaacaaaagatcagaacacacacacacacacacacacacacacacacacacacacacacacacacactgagaaggagtgggggcaccagcaggacctagaggggggaaagtgaaaatggaaacaatgtaaataagtacccctgtatgaaataagttaaaattttaaattaataataacaggcagtcctggaagcctttatattaaacggcttggtggctgcggtaccttcccctgaatttgcctgcactagaagttgtacagaagctgcttgaggctggttggaggtggtaggaagtgggggaatgtttaggctctctttacagaaaggttcttttgtgagatgtttggagagtgaccatattattttctcgagtgtaattgtgcttctctggtttcttttcttccatctctttcagccgtgtgtgatcatcacactgccttttcttaagtaccatgaagtatttaaaaaatgaatcgaatcctgaacgttttcctccttttctctccctggtaacttcacaaatccattaagcagtttattactccctaggggctgagtgatttatcatcctgaccttgctggtcagattagcaaaaacctaactcagaatgaacaactctctctctctctgtttctttgagtgatgagtggaaaatcttaaataatgattagtgcttgtaagaaatgaagagaaacaaaacattttttttttcttcttgacattaaccatggatttctataagtagaaaatttttttttcctccattttgagaatatataactaatttatgtgctccatcagaaattactagtgcaaattcctgatatagtttctgtttttattgtaaatttgtttggtctcagcttttctaattcgtagtaaagacaattagtactttctagttttatttataaattattcagtaatgctactgaccatttatattatgccaagtttgttttatttacagagataaaaaataaactttactttcaagaagtaggcttatgagtaaacccatccacacacatgctgtgctggaacagtaggggagacttggcagtgcagaacaggttcaaagaggaggagcctaagtgatgctacacaaaaggtaagaatgctcacattctttgtacagagattgttataacccaagggaaacagcaatgctcagaccaggaagacacatgggtctgggagagagggagatgctacagtgtgatgaactaggaatgagtagagtgcagaatgagaatggaatggtggaatgtgcaatcctgagctaaaatcacagcaattcagtaaagggcataggaagaggactggtgaagaaaactataaagtatgtattagttagggttacttaataaaacattgtgaccaaaaactaagttggggaggaacaggtttttcatgttgctgttcatcactgaagaaagtcaggacaggaatccaaacagagctggaacctggaagcaggatctgatacagaggccatggaggagtgctgcttactagcttgctccccatggcttgctcagcacacttttttttttttatagatctcaggaccaccagcccagggatggcaccacccataatggggtgggcctccaccatcaatcactaattcagaaaatgccctaaggtgggtggtagtggcacacacctttaatccctgatctctgtcagttcaaggccagcctggtctacagagtgagttctaggataggctccaaagttacacagagaaatcttgtcttgaaaagcaaaagaaaacaaaaaaaaaatggaagaaaatgccctacaagcttgtctacaaccagatcttacggagacattttctcaattgaggttccctcctctcatatgacttcagtttgtataaagttgacataaaattatctagtataaggtatatatagagaggtacaaagagatggtgaggtcacattattttttttaaatctctaggctactaattttacttgagagtataaaaggtcataatttactacatgttattaatgttgattgtatactaggatacctttaccaacatttaagcttacgacatatttgaagatgtttgactataacaagatatcattgttcaccagtgagactgctaggggatatttacagaaataacatggcataatatttgcccaacaagagactagttaaaagaatgttttaccatacagtagtatattttatggaaagtaaagttctgtttctgtaacaataagtctttccactgaagccacccaagccctgttgccatgtgggtgctttctgccaggccactcaagttccacccgttgccatgttaaggtctcaagtaacacacagagacttatattaggtacgaatgcttcttggccgatgactaggacttcttatctgctagctcagtcttaattatcataaatctatatattttataagacttatcgtggacgccttcttctagtgccctctcttgctggcagatcccatggcgactccagagcagagaccaggaggaagagagaagggaaggacttccttcttgcccttgcttatatatgagtctgtctgctatgtcacttcctgcctggatcttttactacatttcccagaatcctccttgactcctagtcccacctatcttgcttcctcattggccaaacagtactttatttaacaataagataaacatatacagaagggcattccccatcataaagtggtgaagcaatcatgcatttattgaccaggaaggaagtttttgctttgtcactaaacataacattcagtttataaacaccatggatagatttctcttttttttttttcaaattggttcatggctttttatttagtttttgagattataatatacttacatttcccctttccctttccttattccaaacacgcccatatacccctacccactgaccttcaaattcatggactcttttttcgctaactgttattggatacatttatgtataatgtatacatatattcctaaatatagattattaaatttgtataatggtgcttgtatgtatgtttgcagggataaccacttgacattggacaaccaattggtatgcttttccctggggaggatcaccaagctggactctgaatcacgtatactcttgtcatacatgtaagtgtttactaagccaaagtaatttggagttttgataattcagctaaaatgctaacactagaaattttcaaactagtctttcttaattaaccaaagtctctattttctgtttattgttctcattattgagctaatgagcatagtgattgatcttaatattacttcttttaaaatctgtattttcagaatcagggtaggatctaattgtggcaatgtgtcatgtatctattatcattaatttatttgtttgatgtccctttaatgcttggggttcattagtgcagataagatcttggaggaggaaatgacacgtgggggagggcctaagccctgctccaaatgatatgacagacttttaagatcccccatggaaggcctcacccactctggggaacagaaaggggatgggatgggggtcagtggggggcaggggaggaggggagggagagggaactgggattgacatgtaaaacaaacttgtttctaatttaaataaataaataaaaaagaagtggcgaaacaagtatgtatactgccttatagataagtgtttcctggggtgtaagacttcagggcctagggctgtcctggctgttccttccttcatgccagccagagtcctgctccacactgaaggtcctctgctttgcacttgtgagttctcttacattcctttaaggtccaacatggcttctttctagacaaacagtgatgggaggagaggagggggagcaaccagctggtagagcaccaagtgaacattgagagcagagtgctgtgtactaatttgagtaacacacagctggaaatggaaacctgagctgagatccaatcattgttcactgggagatgcatgcttgtttcattgatacaatgcccatcagtcaatcagaaagctaaacagccacagacagggtctagtctggatataactgcagtgtccctgtgtggttgtgtcaccactgacccagtacctggccatgcactcctgtgctagaagcttggttccagggtagcagttttgagatggtagaacttttaagagaggggacctagtggaagggggtttggttttaggcaccaggtttgaaatagtgtggttttgtggaactctgattggttcctaatacagtgggttgtcataagaaagaaaagcaaagccgggcgttggtggctcacgcctttaatcccagcacttgggaggcagaggcaggcggatctctgtgagtttgaggccagcctggtctccagagcgagtgccaggataggctccaaagctacacagagaaaccctgcctcaaaaaaccagaaagaaagaaaaggaagcctgtcccttaaagctgcctggctacctttctgtcttgacttgagacccctccctcttatgtgagttcctacactgatgccatttgccacattgagactcaaacaaccccccccagctccacctaagcagttgctggcacaatgcttttatggctagaactgtgagttaaataaacctccatttttaatttaaattataaacaatcttgatttaaattccaatcccagttccctttccctccccgcctcccctggcccacagtgaccccctattccatctactttctgctcctcaaggaggggaggccttctgtaggggatcttcaaagtctgccatatcatttggagcatggcctaggccctcccccatgtgtctagcctgagaaagtacccctctatatggaatggggtcccaaagtccattcatataccagggataaatactgatctactaccagagtccccatagattgcccaggcctcctaactgacacccacattcagggggtttgtgttggtcctatgctagtttcccagctatcagtctggggtctgtgagctccctgtttgttcaggtcacctgtttatgtgggtttctccagcctcgtcttgaccccttaggaaaatgtctagagatggacaaggttgaccccatttaagaatctaagcaatagtggagaggctaccttaaatgcccttcccctataatgagattgataactaccttatatgccatcctagagccttcatccaggagctgatggaagcagaagtgaacactcacagctaaacactgagccaaactcctggaatccagttgtagagagggaagagtgatgagtaaataaacctctttataaaaaaaagaaaagaaaaggcataattcaagaaagaaatcactaaacatagacacctcctttagtgaaaaaatgactaggttttctcattcacaatctctgaaattgccctcactaaattctgcatttaaacttacccagaattttattaatttcagcattatttgatgtagggcatttgttatggcaaataagttttttttataaattccatcttaaatttgtgtgcatgtgtgccactgtgagtggctattaagggacaattttcaggtatcagtgctctccttccaccatgtgcatcccagggattaaactccagtcatcatacttgacagtaggcacctttatccactgaatcctcaagccagcccaatccttgttttgtcatgtatcattcccctaaaaactgtattccaactaccttgttaatgattgtacaaaatgtggcctttttttttttttcagattccaaatgtgactataagtcaggcacctgtactcacacattttgtatttgtaagagattttgagtggctctaaagttaacaggaggcaaagaaaaacagaaacccccaaagaagagaggtagattgagccaagatgctatgaatgaagactacaaggcacaacaaaactttcccctaaaggcatgatgggtgaaagtgactttgcttctttcttaatgcataaggcagagaagaaaacatggtcttcacagttttcatttgggggttaaaccagcccagaaaaatcaaaaattgttcttatttgaaagaaacatccttgtgctgtttggagttcatgtgctcagagatatgggaggaagaaatatgggctctgcagtcagatgacttggtttgcatcccagcttggctgcttgctagctttctgaccttggacatgtaatttacctctttaaactctgctttgtctgagacaaagggctaataataaccgtctccaatgcatgaggtaagcacctaacaatgttatgttgctttttattatttcataaaagatatggaaatataattcagatggacaggttattatataccactttagaaaaccaagggccgtaacgtttgattattacctagaaaggacatttctctggacatgttgctgcctggcgtaaggtctagcataagaaaatcctgcatgaaaaattgtctctctttgggggagaagctatgatgggtctgctttgtgaatgctttgaaatcaggtccacagactgcttttcagtgctaacgacaatagacaatgcttgctagatcctggccctgaggtttaccacaggatgtctgtggctgggatgctgcctgaacattccaaagcagtaaatcctgccagctggaccatcaagcctgtggtccagtggtgcaagccagattacagtcagtgagtgaaggtctctataggaacttaaccctgggggattgtgggagaagcatctcacctgccagctagctgcctgtccttcctgtagtgattgaggtcccaacagctgagtttaggggacactgcagttttgagccacctggtcgaatctgctcccttcgttacagctactaatctgccttttgaagtcttgagttacctgatggcagagaacagctggtgccagaaagcagagagctgccctgggagaccgtgttccaggcacttcgagcttcaggtttccccttgcccacgcatgttagggcaccagtggcggcgagccactcgtctgctccacaggctgtggagccagggaggcgagaacgtgctgctgccattctcagtgccatttaagggctgcgactgctgttgctatctccacagaaatggactggctattgccgtttagactaacgcgggggaagggtgggggtccaaacccaccagattttatgtccgtgttatatctgctttcaaccttaaacaactgtattaagtgctctttgggttaggctgaaatgctcaaggaacctcattatagaattaattatcatggcattttatgaaggggaaagatgagtccagctgggagactcctgccctgattgctgctggtgctgtttgatttcagtaactgccaagaggtgcactttgcaggcttgggcagacatactttgcaagacaggaaactggggtgggggcagagagggaaaacaacaataaaatgccactgatcagtttcttttttgaaattgtaaattacatataaaaaagaaattgaaacatgaatagacaaagactttgtttatttattgcagagagagggctattaggatgctgggctgtgtttccatggcattgtggagacataaacagaaaacacaggctaatgcattcagttaggcatagattttaaagtctaatgtgcaatctaaatatgtatcacatgtattcttgctacttatttatctattatatatccaccggtgaagggagactgcctaactaatgggagactgtgatccgtttgtaaatatgcctacgaattcaaaccttcacagtttgatggatgtctgtggctttgctgtgttctttgttgcctgaggatcactgatcacttgttaatctacctttgcctcttctagactgtgggttgtcaatgcaaatgctttaatccaccttccaggcaggcagataacctaaaggcagggagtgagtgaagtgggtatgaatcatggtgagtggcaaggatgcaggaaactagacagcccatgctctcatcacacacacacacacacacacacacacacacacacacacagagagagagagagagagagagagagagagagagagagacttatttcatgagatatgacacactttaaagagaatcaataaatcttcaatttaaaattacagactaagaaatgactgtttaaagcaaatacatcaaagaaggcagagtcctaggactgccaggttgtaagtctggtttgttgactttgctgacaaacctttagcgcttcagctatgcaaactgcccactgcatataatgagtcaatgccaaagcggagccagaatccattagtgtctcactcactgctatggtctcccctgcttactgaggctttagaacttccagattcctggtcctgtgctaaaagcatcaaggaaagggaccgaaaaacaaaagcccccaaacagaggataatatggcacaaagctccaaagaggcaatagcaagaaagcaaccgatgggagcagagcaagggtcattctggtggagatcaggcttgtaaacagggtggttgccacttaaagaaaagaactcattatccaggcagctaatcataaaaccagtattcgttagcacaaggaatgctgaggataattattgcctgcctgaaatcaataggtaacattggagtctatcagaacttttaattccagtagttgcacaccattttttttttaatgtaatggattgggagcagagtagacaagagatcagtgttctgtgttctacaataagcaaattacatgtttcaggtgagcttcatacttttttttccaatactcaagtgtgaagtagatttttggtatgtaggactatggtgggatacaggatggctctgagatataatgtaagacttcagagatagaagcgcagtctgtattgctcacagtaaaacaataaattaaaggtaaatatcttgcatgtagcatgatttttatatccctaaaactagagtgtgaatttcttggaaagtatctaagttgatgaattaaaagccccaaaaaactatcaaaaactttccactgaattgtatttttattctcttttctgacaccccacaaggagccattttattttattttttggcaactacctttgcctcattggctttgctttctataaagctgttttcacattgtggtggaaaactaccatccttttgatttttgtcttctatcatcatcatcattatctttaccaccaccatcatcaccatcaaacatccactaaataggatccaccctcttctagctgcaaagtgaatgtgtttctttcttgccccctggcctgtcacaaaggggtctggttttctgtgaagacaatccccttggtgcctgtatcacagcatgctcgaattacctgccaagtgcttgcagtataaattatagctgtctggtgggagctttaattcacatgcttgatgttttaaaaaaatattttcaaggttgaactccataaattcaagtttttgatggggttatgtctgctctcatttttccctttcttcctcttgcatttagaactaaatcttcagaaggagatggcacaagaaagaatactgtgttttgatgtgtctcagttaatgaatactgagttagtatgggctagagagtaatatgtcatttgacactactgatttactcattcaaatgagccagctttttaaaccttaaaggcaactttggttctcaggagtgctttgttatggtccatacacttgggctcatgctatgtaagacacactaatgcacagatcatgttgcatactactacatggcatgctattgcagtgaaactgggaaataatgaatgtttactttgtctggcttcaagttggacagaaacttggtttaacaaatattttgtcccacagaaactaaacagagatcgtatctccagattaactaattgacatcatggaatgaggggaagttgagattgaggctgttgactacaggcaggcaacatgagaatggcagctataaaccagaattgagcacctctttgtacccgatccaatgagccatgttttgccaacaagcaattcacaggaaaaatagaagaggtaaggaaggaatggttgtgaggttgagattagaactaatggtactgccttgcatataaacatcttatttcaaattgcatcctatgaagacagtctcttgtacccaacgcctccatttcttcgtttgtgtatttatttagcttttatgctagagggggtatgtacctgggtaacagaggatgctcagtccagctgaagtaggaactagatcaccatacttcctgcctgtctttgctcttgactatctcctcttccctttggaggaaaaagttacaaactatagaactgtctgctggtttaaccttgtcttcctctgttctgtccctactccaaggacaggttgccctgtaaagtgtctgctctcctcccaaccatagatcttcctctgatcaatactgaactgtgattcaatgatataaagacctaatagcgttctctgcttcacagatgagatttagggaggtagagagaactgttcaaggtcatacagctaggaagaaatagaggtagaattctaacctgaatcggcagactcccaaggccatccttggcctaagtatgctggctctcatggctgttgcaaaagggacattaagggcaattgagaaatcagggccatcctcttcttctatcatgggtcttgtctgaatggttgtgtgatgtgggtcaggcaagccttgaacaaaatgaagctaatttgcaacatttcactgacatcttattttcagtttaaactttttaaaaataaaaaaaacataaaacaaaggaccaactgtaaatgagaatttgccctaataagattttcatctgatattaaacttttgtggtaattcttgtattattgattacttttcatgagaattcagaggcacagcatttcctgtgcatttttttctggagtagaaatgcaaagttttccaaccataattattgcagcaaagatagatattgcttcattgaagaattaaataggaaatacccctgcagaagaaatgcttgtattttacatgagggaaaactctgaactatcaagccttagcacccccatccccatcactgggaatgtgttctatcccatgctcacaaagctgagaatctaccttgctccatcccactatgttaacacagtttaaaaggcatggaaggacacaggcctccatcccaggcaccaggccatatgcattgtagtgtctacttgtcatcctacttgataccttgtactctttgtaagttatactaagtgagaagcatactttcaattataaaagtaaaatttaaaacagaatttaaaaactaaaccccagctcatctattttctactccaactgtcaaattacctgctgctcccctctctctctggttttttagaagggtggtaaaggatcaatgtagtacttgaaagcgactccataggtattgaatgcaattctgaggctctttttaagaaagtcttggtcaattcaaattcctgcaagcagtttttatgctcaaataattccccatgaactgagaaacacttgagacctgaagaaagatggaatgagtagactatgggtccttacatgttgtacccattccctcaggagcggaagtggaaagtgtgacccacagaagtggtggtgagtggcagcctaacctatgctgaatgcacctcttaatcttggactttcctttgttaccttcctcatcagccaatggaaatctatatgaaaaacaagattctatgtagtgattgtggcatccagcaagtcatgaacttagcatgcacttttaaatactggcctgtttaccaggggacatagtttcttaatgagccacttctgttgacctttcagctctggaatcaggacaaaagagagagaccataggtacagggtcagtgacctcttatggccctttcaaatgcttctgcacttttgtaaaaaaaaaaaagctgatgcaccaggatgatgctttgttttagttatattttttcatgtctttcttgttctcagcatctcattaacaacagagcgttctgtagagattagggctgaacagaagtgaagatgcactgtgggtgttcaaaacctacttcctttgttcatgttagacattgctgtgcatttggcagttaaataactaacaacatatatagtctttatagcatttatgacatataataatgggaagataggaaaaatgaagtagtgaaatattggtagttatgtaaggtgatagagagaaaataaacatggcagtgattgaagcccctgggaagcagagttattggtgtagactaggggatatatcagtcaaaattggcagactcagtgtggcccaggaacactacaaccaccttgcttgcttttagcaatccagattgctcccaggtgtggtagcatgctcctggaggttgagcaggaggaacgaacatttgtggcagaacatatcttaaaaactaagtgcaaaaaggaaatagaaactttatctaaagataaagactcctcagtatgagtatctacaagtgagtcttatatatctctctaccttttgagagacattgagctaggttataaagcaattctggaaacccactgctaaggaccacctctgccatcattgcaagcatcgctggttggacacaaggaaccagaggaagttaggagggagttttacagttggttgaaaagagtttgccaatagctggtaagttggcccaggaagatccacacatgttatagaacaggaaaactggtttaaaacaactccatgaaaagtgagacctgatagagagctgccctgtgaaccacattcaggaaataggtcacaccaggaatgacaagataaatagtggtctcctcttttcttgttcccaggaccagagaaatgcagggtaattgatgctgccagcccagaggaagacttttatttctgtgttaattattactaatgactacaggagctcacaccaaacacatagtctcatgctttagagttgacagcactccagtgctagctattattccttgggttccctttgagactgatatgatttagggaaatagtgtgacatagtagaaagtacatgtgccttgtttcaactcttgtatgtggcatatttagcagtgtttctgggacagtgtaaggcctttgaaacttactttctttttgaactatacagaagattactattatccagaagaaataaggacacaaaggaacctgattaatatattctgtgtcatttgtgtctactagcagacacagaagacactatggtttatgtccatataatctgcacaaaaggtaataaataatggtgctgatttagggtggaagagattcactaagtctggggaattgaaaaggctttcagaggtctcctagaccattgttccatctaacctgatccctagaaatttcctggaagttcattatgtattcatgcttgagactctagtgcaaagagcttatcccccactccattttttttttttttttgcttttgacaaagccttttcaattcatcacttccaaaaatacatgttttcagaagaccagttaatcaatatggaaactcacacttgaggaaaaatatgtgttataaggtcaaagaaattttcaaactcctggtttcaataaagttccccctagacctgctttgaaaagcattgtggttttctagaagaatgctgtattttctaggtaatactttcttgaaggatgtttttgagatttggtgtttttttcgcatagcatactatggcaaatactgagaaatataacataacttttctttacattaaagaaagctgctaatatctgtaagcattcctttcatttctgctcaccagaaaagaaaaaagaattatgcccatcctgccttctctcaaagacccatgcacccagtgtataaattagagacatggcatatctgggtggcttttcccttcagtatctgagactttagcccttcgtacatgcagatgggttactgaaaagcagatgggatgaatctcccttgctgatatttccaattaaacaccaagggaagtacttatctgaaagacaaacaagagcatcacaggaatcgtctgtgagtgcttttgatgcctcttgccactctgtcacccttctgcaggcaacattctgataccatcttggagttctggatgaacaaagcagaaaaagtaaatgtaaagggttagccaagagcaccaagggagtctaggtgtcagatcccagaataaaaagacagtgtctggctcctgtggtctcggcttctgaaaagagcacagctctgagaggtcatttgatgctgtgaagggaagatgacccttcttcctcctatgacatctttctgatgggatcttctgatgtctccaggtccacattagttatgtaatgagaaagtgctgctgtcatcaaaggctcagggcagttataaatagtctgagcatttggagtagtgagaaattctttttagaaaacatacattcatgtcttagccaaggtttttaatgctctgataaagtaccatgacaaaagcaacccagggaatcgacggtttatgtcttcttacaactcctaggtcacacaccatcattaaggatgtctagggcaggaacctggtggcatgaactgaagcagagatcagggaggaatggaaattgtgggcttggtccccatagcttgtttagcttgctttctcacatgatccagtactatcttcccagaagtagcactacccatattgggatgggagcgctcacatcagtcattaatcaaaaaaaaaaatgctacaaagctttgcccacaagacaatctaatgaaggaggcactttttcagttaagatccccctttcccagatatgtctatattagtgtcaagttgacgaaatctaacaagcacaatttgcttttataatttatctctgcaaaaaatgaaacaccatggatatattgcaagggacttgagaggagtcagactccctaagcatcagcctaattgtgtgccactgacaagctatgagactgtgtgcaaagcattatccaacctagaatcttctatagagcatgaaggttgacaaagtatctctcaactttatcccacatctctagtaccataacctattatgaaattttcttttcaatgcaaggattttcttttagttcataaagtaaatatacaagaaataattttatttcactgaaatcaactgaaccatgagtatatatctaacctaggtagagtttacccttagaaaccctattgttagggctaacattcctatccttgaaaacatggctccatcacattgacttattcagtatcagagcaacatgaaaacccctggttatcaggtacatgaccagacatacatgctggtgggcactgccatgtcgctgaccctgctaatctgccactgggtgcttagggattgctgttcctatctcatgcttgaagcgtaggttttacattgagattagggtttaatgtctagatatttttttctttcctaggtcatgaagtcatgccctttgtggcccctgttgatttctgcattctaacaatctaagaattatatcatactcacatctgagaacagagagcaatgattcatgtatctggtcggctcactttttctactactacagttcaaagatcccaacaaggacatggtgctgccatagtggatgagtctttcccacctcaatgaagctgtttaagaaaataacctcgccgggcattggtggcacacgcctttaatcccagcactcggaaggcagaggccggcagatctctttgagttcgaggtcagcctggtctccacagcgagtgccaggataggctccaaagctacacagagaaaccctgtctcgaaaaacaaaacaaacaaaaaaaaaaagaaaagaaaaagaaaataacctcaaggtattcccagaggcctcaaggtatcccagttgattctggattctgttatgttgacaattagcactaactgtcataataatgtcacaccctcctcatacatggatactattgtgttattgaaagtgactatgagttaagaagcattcaaaaaatctaacttgacacatagattatgtctttgactaatgagatattaacaaatttttaccttatcacttgctaaggcacatgcgatgtcctttaaatgtatctcttaatcaatgcatcaaagctgtggggacggtgacctcagatactgctggttatctgtaaagtcttcaccttccccctcctcttcccaagagaattataaatgttcttttgaagaatgtacttctatccctttcagtcatgtctcagaggaatcagtctgaagaaacttaagggatggaattgactggtgcttctgaagctaatggtaaggtcccccatgcaaggactgctcaattctgtgttgtgacacactgaaaaatttgcctggatgtttctggaaatgagtttgtgaatatattaaaagttttgaacatatcctccttccattccctctctgaacagacaatctaggcattggtggagaggaaaacctaaattcccttctcctataatgagactgatgactactttttatgccatcctagagccctcatccagtggctgatggttatggaaacagaggcagccatccacagatatacactgaatggaactctggaacctagttgcagagagggaggaatgaagatcaaaggggtcagtaccaggctggtgaaacccacagaatcagctggcctgaacaagggtgagcacatggatcccagactgctgagcatggatatcaatgaggaggactctgcactctagagggcccctggtagtggattagtatttttccctggtgtaagaagggactttgagagcccatcccaaatgaagggatgcattcttggcctggacacatgggggagggcctaggcccgacccaggatgatgtggtggactttgaggagcgccatcgagggccctaccctgcctacatgggggagtggagggtggattgggtgggagggagagttgggggggagggaggaagaagagattgacatgtgaagcaagcttgttcctaatttgaactaataaaaatcaattacaaaaaaacaaaacacaaaacaaaacaaaacaaaactgacattagcccaaactaaagacagctaggagaaatgacacatttgagttcatctataatcaagtccaaagtatatatcaagccaacacctattattctttttttcaacacctcttatcctacctaaatagaaaaatattttcttgcaagagccattccataaaattaaaagggttaactgtaatccaaggtattctgacatcagagtggggatacaggagcattgaaggaaacatgatgctttcaaaaagcagtaatttttcagaagtagatcccagttttgaaaggaacctataaaatgcttgaaaaattaggaaaggtaaatcatcttaagaaaactcagtaagatgtaagaaagtataaccatgcaatacaaaggatgtgtgaaatgttcactacagaaatgaaaatagcaaaacaaaaaaacaaacaaacaaaagcaaaaaaaccaaaaaacagaaatcttgtagtaaaaatcaaggaaataaaaacacagttgaaaactttacaagcaagttcagtacaggtcccagtgaagccctgagactgaatccttcctggagatttaggtgtgacccaggtaatcatcatcatatatgcctggtagcctgccttcatctctagtgtggtgtaagcccccattttctgagagaatgaataagactttgccctgaaacttagtgctggggtggtgagaccaccaactgggtagaccttaatgcttaccccaatccccaggctgacttacagacagagcttctgggacagacctagctttggagtaacacaagtgatgactgtttcagagttgttttctagacagtatcactgagtactggttgtagtggtcttgggacacaaatccaacacagtaacaggcagcctgtaagtgtattgttgtgctgattttgatggcctatagactcagcacctgaaactgtttggtggcataggtgggtacaggtaagacaaagaaaccaagcaactttcttcagaattcagaagttcttggctgatgggggatgtccttctgtatatatgtgtctcttattggttgatgaataaaacattgattggccagtctctaggcaggaactataggtggggatacaagacgaggagagttctggggagaggaaggcagagagaagctgccagggagatggcatgtagcaactgaaaatgtaacatgctggagcattctctggtaagataagaccatgtgaaaatacttagattaataaaaatgggttaaccattaagagagaactagccaataagaatcctgagcatcaaccaaagagtttataattaatataagcctctgtgaatttatttggggctgaagggcagcaggaccaggctggacagaaactccatctatacttggccatacataaataattggaatgcagcatctgtgcctaatcagttcccaaatggaggcaagacagactgtgtggtgtgtgtgtgtgtgtgtgtgtgtgtgtgtgtgtgtgataataaaaattttaaatgaaattctaaagtaaattctttgactggtaataagagatattaataataagaaagcacaggaggctataaaacactggtaggaacagttttacaaaaacatttaccaaaacctcatttcaatatggtaagcactctgatgaaaccattcatatccataggatgaataaaaatgaattaattgcaaatgataaacttaagtgatgtgttaagaaataggtaacatggaaagatgtatagcaggataccccaaaatgaaaaatgtaggaaagtaaactatagtttaccattgatgtattttcttcgttcttttgtttggttttgtaatcattttagtggtcaagatgatatcataattagcttataattagcagggttttaaagttaatttatcatttggcaattgcatacatgtatataatatatctcttcacacttattcttctagtctctcctagtaccctcccaccacctccaaccccagcctcccaccaaggctctattccactttaatgtcattttgtttgttttttgttcagtgacccattgagtttaactaggaatattcatatgttatgactgtgcagatatccactggagcatgagtaattcatcagtggctgtgttactgaagacaattttttcctttccaccagttgccctgaactctccttagttctcctaggtgagacagagctcaggggccacttccctatgactgaatgtctactggcccatctttgtacggatctctgtgtgtaactgcagacactgtgaattcatgagttccatgaccatgttatgctgataagacagtgtttacagacttcttcaccattatttagctcctatattctttctaccctgcctttaagcttcaaatgtagtaataatattattaaaataataacaataactaacaaaaactgatcacctcataacagtgataccactgttgtaccggtaagcacatttttcctggcaagttgttattgtagcatgcaaagttgaaagtgacaggggagggggcagagttggttgactttttccatgaatttgtatgcttctggaactatgaaagatggccgttaaggaggaagcattcagtttggatacagcattgtttttgtattctgcatccaagttgtatggtttgtttaactacagaggtttgccatctagttttggtaggggatcaatggcctatatggttttggtaggctctggggctttcctggaaacaggtcttagggatgtgccccagacttggcactgggatttttttctttttattgactcataccttatggaattagaattatccactcatacatgttcaaacccttgttttaaaagctactttaaaattaacttctaaaattgtctgtttccaaatgacttcttcatatatctttggttttagttaagctttcccctacatcccaagttttctccgatgggatctacccctgtttaagtattgcctgtgtcagtacgacaagataaggaaaagaagacaaagtatccatctttttggacaatatggctctatgcataacagatgcatttggtgcattaaagatggcaccgaaaaacagtggatgaaaactttcagcaaattgtcaggatataaaacatacaaaaatcaggagccttcctatatactaatgacacacacacacacaaataatgaaatcagggaaatgagaggggagataagagagagtaaggaagagaaagacaaggtaccaggtttttttctcatatgagaaatcgaggtttaaattttcatgcaattatatgtgacaataaaagcagagagactatttggagggaggaaatgggctagcaaggggaaagaagaagcgagggaggtactagtggggatgaatatgacaagagtgtagatcagtttgtataaaaatgtcctaataaaccaattttttagtaagctaacagaaatacattaaaataaaagaaaaagaccaaaatataggagactaaaccaaatgaaggaactttacaatgaaaactttaaagatactgaagagagaaaacattagataatataaagaccttccatgctcatagattaaaagagttaatactgtaaaagtggtaaccttaccaaaagtaatctacaaaatcagtgctatcccaacaaaaacaattactgaatatatactttcctttgtagtatatagaaaacttttcagaacaggtaacaggacaagctacaaaatcctcaaaaaatgtcaaaaaataaataaataaacaaataaataaataaataaataaataatttttaaaaatcccatgaaatcaggggttggagatatggcttagcagttaagagcactagttgcttttcctaagaacctgtattttgtttccagcatccacatgttggctcataacctctgtttgaattgtaactccaggtccagaggctctgacactctattctggcctctgcagacactgggcatgcaaatggtacacagacatacttacagccaaaacagccatatacagaaaataaaagtaaaatttaaagtaatcatatcaaacattttttttcttgacagtgcaataaaattagaaatcaataagaaaactttagaatttattaaaatataatacaaagaacctgcttccttttgaagtaactgctactgtaaaagaagactaattgtcacttcttatagatgacatattatttatagactcccaaacactggcgaaaagctattaaaattaaactaataagtaaattcagataagttacagattgaaaatcaacgtatgaaaacagtagcattgctatatgttaatagtgaattatttgaaatagaaattaaaaaaccactcacatgtacagtatttaaaaaggcaattagaaatttagggttaagtttaaccaaagacatgaaagatctctataatgaaaactataaaatactaatggaataaattgaagaggacacacgcatacataaaaaaacccatgttcttgggaagaaaccattttttaaaatgttcagactacccaagctaatttacaagttcaatgcaaactctatctagttaccaatgatgttttttaatactaggagaaaaaccaattgtaaaatatacatgacactacaaaaccaagaagagtcaagcctatgaagagattagagagagaggggagagataggaggacaatgaacacaaaactgtgataacccaaaactcccttgtactggtataaaggagacgtagccaaacagaacagagtttaggattaaaaccttgcacccatagcccattggttttaaaccatggtgctacgaattggaaaaaaaaaaagaaagaaaaagaatggagctctcaacaaatggtgctgaaaaaaacaggatagcctattgtggaagatcaaaatagattctatcatcatttagaaaaagtaacttcaaggtgaattagaaacttaaaaatgagacttaactgaaaccatgaggcagaaacagagaggaaatattccaggacattgaataggtaaatcctatgaagataaactcccaaatacccaggaaatagtgcaggtaatagacagaaataattaaagcaatgttaatcttttgctcatcaaagaaaataatctttagagtgaaggtaaaatccacaggacagacagacacacacactcacatatctatctatctatctatctatctatctatctatctatctatctatacacacacacaaaatatgcaaactgaatgcaaacataaacaaggaagctaattaaaaataacctgaacagtcaccctgatacccaaaccagaccagagaattacagaccaatttccctcattagcatctatgcaaaagtactcaataaaatacttacaaactgaattcaagaacacatcaaagatcatccaccatgatcatgtaggcttcatccctaagatgcagtgatggctcagcatgtgaaaatctgtcaatgtaatccaccatgtaaacaaatcaaaagaaaaagaccacatgatcatctcattagatactgaaaagtcctttgacaaaatccacatccctttatgataaaagtctcagagagatcagggatacaaggaatatacttaaacataataaaaacaacatacagcaagtcaacagtcaacatcgaatttattggagagaaacttaaagcaattccaggtggaaacctgcaacaagggaaactctcaggaatctacaaggatgaccacaggtcagagtcctagcagtagcaggtacatagcctgaactggccatctcctgtgactgagtcaagacttccaggggaggttgagataccaacccaaacaacaacctttgacatacagtcaaagtccgtcctgcctatggaatgtgctgggataaggatggggcagagattgtgggagtggtcaatcaatcaatgacttgtctaacctgagacctaggccatggagtaagcccacccctgacacttcctggacggccaggacctagaggctggatggcccagagatctaggattgaaccaaacacaactggagaaaaaatgtaaatgtaatggtgtctaatgatattctgctatacacatagattcatgcctaccccaaaggtcatcagagaagctttatacagttaccaatgggaacagatacagagactcatagccaaacattaggctgagtttggggaatcctgctgaacagagggaagaaggattgtaggagctggaggggtcaaggacattacaagaaaatccaaagaatcaactaacctgggctcataggtgctcacagagagtgaaccgacaaccagggagcctacatggaaacttatctaggccctttacatatatgtgacagttgtatagcttggccttcttgtgcaactcctaacagtgggaacaggggctgtctctaactctttggctggattttgggaacttagtccttatactgggttgccttgcccagccttaattcaaggggaggtgctcacttactgcaacttgatatgccatgttttgttgatatacagaggaggcctgcccctttctgaacagaaaagaggaggggtgggttgggagggaaggcataaaggaggtgggaggagagatgggaaactgaggtcaagatacaaaataaataaatttatacacacaaaataacccaaacaattggcaaatatcattcatttatttagtcagcaaatatttcctaagcacagcaaacactccagaaactgtaacagtagctatagttacaattccccctacaagaattttgtagttaacagaaaaagataaaggaagctgaggcaattattgcagggtgagatttgagagggaacttagggaggaatgaagctagggagagcctctgttaaatggggatctttcctcaggggaagtgtctcttgatcagagtcttaaagaggaaataaaagttggccagattgcactcataccagctatgtgttttctttccctggatcctacatttactttgagatgaaatatcacagtaattttaatgatgttgaacatttagctatttgtgtttttgttgaagaactctctttggttctatatttcattttagtttgagttatttgttttcttgttattcaggtgtttgacttctttatatattctagatactgaccctcagatatatggttaaaaaaatttcatcttttctaaaagattagaaaagaatggtggtctcctttgctgtgtagagatttttagcttaaaggggctccatttattaactgttggtcttaatgtctatgctgctggggtcctgttcagtcctttcttgttccaaagagttgaagcatagtccctttattctctgttatcagatttagtatatctgttcttatgttaaggtcattgatccatttggaatttagttttgtggagggtgataagtatgaattcatttacattcttttacccgatgctatgcatttgaccagacccattttcgaagatgttgccaatatggtaataagtatggaatctcctaaaataatctgaaatatgatttaccataagatccaactattccattcttagacatgtacccaaagaactttacacactgctacagaaatacttactcatccatgtatatggctgttatatttatagtcagaaattggaaaagcctagatgcccatcaactgaagaacagatagtaaaaatgtggtatattagcatgatagaataatattcagttattaggaaaatgaaagtttcaggtaaatagatggatttagaaacaatcatcctgagtgaggtaacccagatctagaaagacaaatgttgaatgttttctcttatatgtaaacattgaccttaaatgttcagatatgtatgcttcattcagaataatcacagaggttagataactagtaagagactagtgggggaagatggactcttttaaaggagaaataagatatggtgatataaaggaataaatgagaaaatagactagaaggattaaatggggagggggatgggaggatgggttaaagtagagaatatggggacaactaacactaaagacctttttgaaaagccatatggaaatctactattgtatagatctttctctgtgtgtatatatgtgaaaatactttaaatagagtcaccatataaagcccaactagacatgtgctacaaagtaaaatctctagtacaagggatgagttacatctttctgagcttttggacaagagtaatcatcaattttacccacctatgaacccttggagctacaatagcaacaaaatattctgactcaatagtggtacaaatgctataggcataacctactattttaaaaaatattttaaaggcctactatatgagttggtaattacttgatactgttaatgagatcaagaacctgagattgagtaggtcatggtcctagggaaaatcttactaccgttattctgctaaatgaacacagcaataaaatggttcctaatgatacatttctatagccatagatcaatgaatcactcagctttcatcagaaaagcatcttcttgtagtagatgggaattaacacatagacccacaactgaagcatggacagagtgagagaccttgaacatccagttccaaaagacttgtctttatcatacccttctctgaagtctcatatatatatatatatatatatatatatatatatatatatatatatattaagagccagtggttggagataactccaaggaaacaacatttttcagatacaacaaggctgatgcatgtatgaactcacacagcatggagaaaaaaacatcctactcatagctaggaagttatttgcaatcaatagcttccagaagagggaaaattagttttcttcaatggagtgacttttagcatatcaaccaaggcaaacctcatgctcagtatcaacacacagtggagtagactccattttatttttgggtttgcttttttttctttctttcatttttaagagaaagaacacaaagttcaatgggtagggggtagtgaggaggatctggaagataatgggagaaatgaaagactatattcaaaacctattagtcttacagtttcagggataataaaaatatattccctgaaaatttttatttattaattttatatttgtattccccttctacccctccttctgctccttcccaccttcccccaacccacctcccagccacttctccttaaagggtaaggtctcccatggggagttaaagtctggcacattaagttgaggcaagaccaaatccctcccctctgcttcaaagccaagcatggggatgggctccaaaatgccagctcatgcaccagggatagattctggtcccactgccagccacccccacaaacagaccaagccacacaactgctgcccacttgcagagggcccagctctgtcccatgcaggctccacaactgttggactagagttcatgaattctcatgagcttctatagaatttccccatcatggtcttgactcccttttgctcatataatccctttccccctctctttaacttgactcccagagctcagtctggttcttggctgtagatctattcatggatgaaggctctataatgacagttagggtattcaccaatcttattacaggggaggggtgagttcaggcactgtctccactattgctaggagtcttagctagcaccaggtttctccctaacccataatggctccctttatcaagatatctctttcattgctcctccactctattcctcccacaactttaccattccattcccatatgttctcactccccatcctctctctattatcccctgcccccagtttacccagggcatctcatctatttccccttccaaggatgatccatgcattcctcttagggtctttcttgttacctagtttctctggagctctggattgtagtctaattatcctttgctttatacctagtatccacttatgagtgagtacatactgtgtttgtctttctgagtctgggttacctcattcaggataataaaatagacatcaaaataccaaataatccaattaaaactggggtaaatatctaaacagagaattctcaacagaagaatctcaaatgtctgaaagatatttaaggaattgctcaacatccttaggcatcagggaaatgcgaatcaaaacaactctgagatatcatcttagatttctgttagaatggctaagatcaaaaacacttaaaacagcttactttggagaggatgtggagtaaggggaacactcctccactgctggtgggagtgcaaacatgtacagccactttggaaatcagtaggtcaacttcttagaaaattgggaataaatttacctcaagacccagtgataccactcttgagcataagcccaaaggatgtttaatcatacctcacaacttgctcaattatgttcatagtagtagtattaataatatccagaagctggaaacaacctatatgtccctcaactgaagaaatggataaagaaaatgtggtacacttacacaatggagcattactcagctgtaaaaaagaatggcatcatgaaatttgtaggcaaatggatggaactaaacaaatgtatcaaaaatttttaaattaagacttggtcagagtgaatgcaacaaagactggggcaggcttgaagggaggaacttgccttgtggaggtcttaggtcctagagatgagtatggttgttgtacaatattgttttaagatgtattacatttgattatgctgtggaacatttgtttaatgatgcaaagctgtttggcattcttctatgttgcatttgttaactctgtgaagctgtgttactttgctctgtaagtactggaaagacatttggggcaaaagagtgatgacatccagtttagaaaggacagagaattcatggcagcagagtatggccaagtttttctgtaatagatgatgtaggaaacatttcagcctgtgagccatgtggttgatttcttaacaactctgtttttctactatcgttgtgatgaaagaaacaggtgtacataatacttagatggttagacaagggtatagtctaacaaaattttatttaaaaaatattcaggcataggttgaactatgtaattgggctaaaattggctacagcttgggttggggaaaaaagtgaaattcaggaagcaaaagtctactataatacttacattatgttttatatggacatgttttaataaagaagcaagaaactggatgatgcttgtattttaatagtagtatattaatacttgaaggagaaaatactaaaaactaataaaagagggtattgagaaaaggctctgtggagaaagggctcagatgtggatggaaatggatgctagacatgaggtgaggcatttacccaaaagcagatgagaagtcaaagctttttcctttggggtggggaagcaggatatagtgtgggtgtcaatgttagtgagattatgaggaaccagaggagatggtggggatggggcttattatcttctcagcaactttggaatggggtctctgctgacaaggaatgagtttcagatgtttaggagccctaagaatagaagataaaaacatctcctgggaaaactcaagaaaatatagtttttttgtatttcttcagtgcccacactattttcttttggcagtccttaagtacacgaactggttgtgtcgttaatgctattgtgagtctagaacccatgctttgtctgatgctttgtctgatgacttatacagctttcagactcatgatggaaccatacaggttacaaagggataatgggcctcatggcatctgcttctaaggatttggtctccctgcactcttctttttcatacacaatgatgacaggtaccaagattcttaaccaaggagtgtatcaggcagttggggaggtccatatgtccccaagtctttctagcatggggatattaacacatagctccaagtaaggaagagagcaaaaatattagacacagaaataaagataaataagctttaaacaaccagaagtaaatgggaacactttatccttacaagaagagcatcatccttaatggagaatcctggaaatcacctcctcctctcacagtgtgttgctttgtgaggattcacattttgtggaaagaagtccccttctaggctccctcagatcagagggaagtaggctgcaaaatgtaactagttatggaaaatttcttgctaccacgatatttgtgggcaatctcttctgtgcacataaagtaattatttatcagaaaaatttggaagtcctgtatgtactccacacacatcaggtgccagggaaagcttcttttgcctggctgcgatgaaaaagtcatgcagaaagctttcttgctttatctcagtgggagctctgggcttctctgtagtgaggtccactcccatattatctgatctacactgcttgtgcccttctaatgtgcaagggaaacaaaagaagctgggagaaagatggagttagactagatgtgttaatttgcatgtgggggagggagtctacaaatgacggagcattttcccagcagtgtttgtcagtgtgcacagactccgttactttgcactacccaattatgcgctacattaatattttatgcacagcacactacatttcatagtgtcactaaaattaaatctgactcccacaaacactggcagcacaccaagtcatgtaaaacgtggctgtattgttgctcaaaggggtctctgtcctactctaaccatccccagcccaaagcatcagaaggtcacatttctcccaataataatttgataacatagataatataacagacaggacagattgtcttttcatcagactggagttcaatgcctcccttcttttaagatcctgttacctaggtgatgctcttcagggactatcaagataggttgagctagggcaggagtagtctgcctccttctggtttgaatatatcctggaaaggggaactatgggggaagccttagaataaccacagctcaggacaatgtgagaccatgaaacatttgtaagtcattttctctattaataaaggatcatttatatttcatactcaatatgagaacttgtctatgactgttaatgaggcaggataaaaaagatgggggaaattatgaaacctggtaaagaaaaggagttccctgtcctggaatctggtggaagcctcttgccagtagagaagcaagaatcccagtaatctaacaaccacttgaggactagtctccttcctggctaaacctaaaatatcctaggattcttatctgaaacaatatttatgagaaagaacaagtattaaattctatgaaactcccatggctcatgattttatcctatcatatccaaggcatttgcagagccacccttgaatttcattgagagagagagagagagagagagagagagagagagagagagagagagagagagagagagaacagaaaaataaaacaaacatatttcttagcaaacttttaaaaaaccacttgaaagcaacccaaatatatgaggtagcagttactaatctcattcctatgagaaattttttttacaacatcaactgagcaagaagtaagggtttatttggactcacagcctaagcagaagttgtggcagcaggaactagaggaagcagctagtcatattgtgtccacagatggtaaacacaaagagatgactgtttgtgctcagctcactttctcttttttattcagtaggattcaagcctgtgaaactgtatcatccaaagtcaagctaggtctttccacatcaattaacctaatctaaataattctacacagatgtacataaaggcttgtctcttcaatgactctagatcgcatcaagttgcaaatcaatattaaccatttcacttagctaatgataagacacttaagacttaaggaacccatatttgcaattggttatttatgtcttggtttatctttgattgattctttcctaacctcacacttatggtcttgtggttccctgtcttccttggggatcactgactgctggtccatgagggtggagggagcagaagtggggaacagggttcggacagctatagatacaatggagataggcttctgggagatgacttcagtgagacaattcaactttattccagagtataaggaatacataggattggatatgatagttggggaaccacctaatttgcattaaatagcacactcctaaaataaagctggtttagtggcagtacagccctatgaaaatagctagagcactgttacttaattatggtgtggtcagcaggggaagagcgtttgcagggaactatgtcaagggtcatccttgagacatcctccaaataagagcaggtagagagcaagaagtcttgctgggaagggaaacctagatgttgctgagcttggataaagctgcaacctctgaccagcagggcctcccaacacaatctatattaaagtatctttaggaaaaaaaccttccaactctgctttatactgactaggctgaaattattaattttcaagattcactttctacttcagttatgttcttatgtggcagaaggtgcatatgagggcagatgcctaaagagaggccagaagagggcattgtatcccttggagctagagttataggtgattgtgaactgcccaacatgtgtactggaaaacaaactgtggtcctctgtaagggcagcaagtgcacataaccatggagccagctctttagcctcacaaaatttgttttctgcataaaacccatgaatcctgggtttgcttaagttcggctgctagaattctaaggggactcctcagtctgttgtgggtaagaatgtgacactgtgcctctgtcccattactgttgacactaagaaggaaaaatagtgaggctggaaagatcatttctttctttaatcagtttgagcaccattattctaaaaatataaagtcaagatgctccaaaatccataacttttgaagtaccaatatggtgtctgacctcttctgattggtgtcaatcagaaagcaatgacttacccacatctcactcagcatccttgagaaaggattgcctcccaacccccacagctgcaatatagaaaacattccatgcacaaaattactagagctattgtatagaattaccaccaggctatacatataaggtatctgcaaaacaactttgtaattggacttgtaatccatgacatattcatttcactatgagtaaatacttccaaattcaaaaacattaaaaatccacaacacctcaagttccaagcactttaggtaagcctatactctgcattttaattctgattatctaagtactttccaagaggttcggcctgtttgtttgtgtaacccatggataaatgacaatttactttggatcttgcaagatctttcttttcacctcttgaagccagctgatctggcactctcctttatggacaactctcgtaagagttgaatgttttaagacacaggccaatggaacagttcacaaaggtatcttctgtgacacttagtcaacagtacatgctaatttaactgctctttttgctattagctgttcatttaaaggattatgatcaaaacttatctcccttcctacattgcatatgtaagggaaaggctccatcctgacattccccacaaagggcaaaggtctggactctacttcttggagtcttagaaaaacaacttgtggtccttcctaagggtggggttgagaggctgggatgggcactgtgcatgactgtctctatatacattccatcttccctacgagaagtcatgggtcaatagcttatgttttttatggtttctcttgatatgtgaggcttcctgtctggctgctctaagagggagatgtggaatctaaaatcatctaagttgcagtgtagacttgagcaccccgtgactaatgctgtaactccttagtttttgattgtctttgtgtgtgtgagtgtggagccaggggatttggtacctctgtttactcttcctcactatctctgtaaacacaagatgtcctgaaatggtctctgggtagctttttttttggtaagataggccttggtctaggcccttgacagaggctttgaaacattgctgtatcatgtcagctccctaagttctgtgatactcttgaggctattctcatgagtaactaggcctcagattttcttctacatgttgtttacatcaactccatagatctaataatgggtatgataaagcacaactctcttccacattttagaaaagtgtgttactcttgcattacctgatgactgtgtatctcaggagctcattcaagtaactgggacccgatagactcctttggttggaaaaggaagatcccaaaccaccaattcagtcaagtgtttagagtttagatataagcccagccatttttttgattcatctaattttgttaactcttccttctttttttttcttttgttttttgagatagggtttctctgtgtagctttggagcctatcctggcactcactctggagaccaggctggcctcaaactcagagatccgcctgcctctgcctcctgagtgctgtgattaaaggtgtgtgccaccaatgtctggctaactcttcccttttaagtaatgattaattcatttagtggtttagaattgtttgtaaaatttaattttaactctaatttaaactttgatttctttattcatttggtgagacctgtaagctagtgtatcttcaggtttaatgattattataaatgtggttgaaaatatgcattccttagctttttaatctagtgtttgacatacatctgttaggacaagattaataattatgttgatcaaatctatgattttgttaattactttgcctgctgagccattatttatgaagacagaacattaaggacctcacgtgattttttaattcattaattttcagtagcaatttttgtttctaggttttattatgaatatgacatttgcatataatttaaaaacaacattatcctaaaaaattatctgtcgctgggtggtggtggtgcacacctttaattccagcactcgaggcagaggcaggcagatctctgtgagttcgaggctaacctggtctacaagagctagttccaggacagcctccaaagccacagagaaatcctgcctcaaacccacctccaaaaaattatctgtcttaccatacttatatgctgtaatatttgtgctctaatgtttgtttatgttaacaacacagccctataagcttccttttgagtagtacttaccaagtttatattcttcaaatagaatttttaaaatgctatttttgttttcaacaccacacagtgaaattttttaaagacatgatttatactttcactgttgaatatattttgatgcacttattcaccaccaaaaacgaaaaatcaatgacagagttaaaactagagaaaacagcattatatcctcttccataacttgtgttcattacctgcaatcagtctgtccttgtcttcccatagccttttttgttcttgttgaaagcataaaatccaatgtgaagctatgcatggctaactgtaactgtataggagttcactgagttgttagatcttattattttggtttgtgattttttatttgcaattaataatattatttaaattttaagaaaacatgatttattttatatatatgtgtgtgtgtgtatgtgtgtgcctgaatgtatgtgcttggtgtgtatgtgtgtgtgtgtgtggttacatgtgccgtggggcacatgtggtagagttcatatggagtcagttctcttcttctgcctttttgtgagctctggtgttgaacccaggtcacaaggcttgtgcagccagtgcccttatgtgctgcaccatatcaaccagccagaatttccttttcaagacaagcttgagtccttgtgtggtggttcatgtctttaattccatcagtctccccacttctctctctgtcacctcaggttgtcccaagtctagattgtgaatagtccaactacctttttgttattgaggttactttgtatggaatcctatcacctttttttttttttttttacaaagtcctattctattcattttctatctgttttcagatcaatcaaatcctattcatttttctataagtttctaagacataatttatgctattttccctttccatttctatgtctttttctttttctttcaggctatttaaagagagatgtgggagagcttagatgacctggagtacacagtaatggagacattgtgattacctccttgctggagctctgatggaccctcattgtacacagcctgttttgggttgtattgattctgcgtgacccaaccccctggaaataactctggctgctttaattctttaactatttgccaacattattggtataaagaacatttatctgctgacactgattagcttcggggtgggggaaaaacaatatgtatcagggcaaagttaagggctcaaaaatatatcatgaaaacaaatgctctccctctttattctacagcctctggggttgctggcagccatttgtcactatggcataatgcagcttgtaggtaaaactgatacacagaagaggaaaaagtcaaagaactcctcattcccaaactgtacccaaggactcactctctggaactcagaggaacttgattcaatatattcctcattgcttaagcagggttgtcatggatttctgtagcttatagtacaaagaattctaatcccaactaggacgcagagagaagacaaggcatggagggttggctacccattgcttatactaaggacttaagttagccccattccaggaggaaatgagtcatattacattggactctttagaagtgtcctccttttatctcagtaagttgctctactgtttgttttaacttattttgctttacaaaacgttctgaaagttatattatgttgactattgagttttattattatacttgtaaacttcaaagtggcacattttaattatatatcctttaatggaaactgtaccaaacatgcagttaatccagagacatagtcattttacaactacagccgcacatggacagagctacatcagtgtgtgctagctttgccttcctttatcattaataccccaaacaacaaactcataagaagagaagggcttgtgaaaccagatgagtgagatcttctggtgatcagctattcacccacctgactgcatccaggagatgggagaggggagtgactgattttagtgtaacaataggaaaatcccattgaagaaggcaagaagaaaaaagttgcccatatcatcccttctccaaccctaagcagcccagtatgcagaatgacatttctcactgggaagacctgagaaaattaagttcaagcctcatatttggtttatgatgatgaatcagtgttgggaaagctctaccatcctactagtgagctaatacccaaaccctgagctgctggaatagtcaagctaggaggctgattgcacctaccaatactactccaacttcaggctccagggaaagaagcaagagtccacatattagggagcttggtatataaatactagctaaagattttgggttagagccctatgctaggcctattacaaggagactgagttcccagcaacaactagaagcccatacacaaagcagagttcacagccagaggttctagattggtgttagcatacagctgagctttgacatgacagacttgaatttcagtgtgtcttgtgttcccagcactagaattcagtgtactcctctcagaagtgactcaggctagcatccaggtctccaccaatactactccagtctcagatagcatactgtggtgcagatactccagctgaggggaggtaggacaggtagacaaaagactctgcccttgaacttagcccaatacccctcattctggtacattccagttagctctacttatgcctggttgcagtactcttgagctacaagtctaccacagcatcagagagtttacagatgtgggcttgggtcctaaccccagtacaatgccttagtggcctatgggctcagggtagaacacagattggcagcattggtaaccacaggcatgatgtaggaaaccatgggcagagatgctcatccatagtgactacctagagccaggcaaatcctccagaacttgactggaggctagtaatggtaactaggtctggtcttctcatggactcagacagatagctgtgggacatgctactatttttgttactcacctggctatttttgaacaaccttgtcatagtatatttgggacatgcctgagcttagagtgttctatagaactgaaacagtgtcaacataacaacactctcttagtaagattctggcagcatccagtcccaagaccatggaagtcactataggttttgaaggagttagcctgcttggaattcctgggaagacagttatgaagtcagatggggaagaatggtacaaagagccaacccttcagtgcacagatgatgttgttcagtgcaccatgagcatctggagctttcagaagaccaagaccttatctaattaggttccagaaattgaccagataataatcagtatgggagaccccttcagagaatttaaagtggcttttaagaatactcaaacagagaaatgtaaagcaatggaggcaattaaacaaacagatccttgagctgaaattatacccaacaaaacaaaaatgtgacagaaagtaccaatagcagaaacaaatgggagaattagtggactcggggacagactatttgaaaatacacaaatgaggggaaaatataatgaagaaaatttatgagaaattttagacagtattaggacaagtgtgagtgattggacttcaagcagagcttgaaaatgcccaaagggtagaaagcttattaaaagaagtaatacacaaaacttttcaaacttggagaaggataaaaaatatctaagcatgggaaggccaaatcttgccagtccaatttagcttaaagaagctgatcctaaggcattgtgtaattaagctctccttggaggagacaaaggaaattctcacagctgaagagaggagaaacaaatgacacacaagaatatctcaatttaccttatagcagactccttatctgaaactttagaggccaggaaagagaatgaatctcatggtagtgaagactgtgccaagaaggccatacccagcatcttgaaatgaaggagacaaagacatccctacatgctttagtggcttttctgttgcagtgatcaaatatcatgaccaaagtaagttatagaaggaagagtttgtgtgggttttcagctccagggaatctcagcagtaagtagaagtcatggcagaaggaggctaagatcacattttcatatgcaagactgaagcagagtgagcaggaagtagaggaggctatagactgtcaaagcccactcccagtgaagtacttcctccagcaaggctgcaccacatacacctccccagaaggaccagcatctggggaccaagtcttcaaacaacccaacaaaagagaagcatttctcattcaaaacaccacaccacactaagaaaagcaaaggaaattacatatggaatgttaaaggaagtttatcaaactaagagaaagtattattaattgataagaagaaaatatgggaaggtttaaagcttactggtcagagcacacaagtcacttcaacatgccccaatataatggaaaacgtatgataaaaagtttaaaacttggagataaattgatagaaaattacattatcattaatgtattttcttttgtttttaatttgtccatttggatatctctgtggttgtaaaaaaattgctacacacatcggttgctagagtgaaaaataattttaatcccaaaattataagcaagggatcaaaacacataaccgtagtaaattgtttaaccagaatgaaagactatgtggaaaaggggaaaggaagaaaacgtcacagaacaagatgggttacacacctggccagcattcttttcctagatattatgagggactagtgtcttttcttatttacaaccagcgtggcttcaattctcccaagagaaattaagataacaattacagaggttggaaaagacagctgattaagaacacgggctgctctttcaggggatcaagtttctacttcccaagtctgattcccaactcccatatggtggctcagaactatctataacttgagtctcagaaaatctgacaccatcttctggcctcttcatgcactgcacactagtggtgcataaacatgtatgcaggcaaaacacctgtccacataaatttttaagtaaaatattaccgaattacagaatctctcctgatagcaatgtacagttttctggaaacccacctcaaatcacatatatgacctcaaatgccattaagactttcccaatgcctccttactggtgtattcagttcttcatgaagtattgtctccatcagtgaaatgaggttttgactcaatggttcagccataaacccttatggttcctggcagtctttggcaagggagtattaataatataatttacacactgatttggggaaagcagaaagttaatgtgatgggggatgtccttttgtatgctgtgaatatgtttctcttattggttgatgaataaaactgttttagctaatggacaggcaggatgtagccagacaggaagtataggcagggcagccagactaggagaattctgggaagagaaactcagagagtgagttgccagagagataccatgtagctactggaaaggtaggatgcccgggcattctccaatatgataaagccatgtggaaatacatagattaatagttatgggttaataattaagagagaactagccagtaagacgcctaagcatgagcctcagtgtatttatttgtgactaatggctgtgagactgtgcgggacagaaaattctgtctacattaatgtgctgttcttgataaattaatcatcgtgttgaaacaacacacagggtttcagctgatgccatgcacaaggtttctatcacgttttactaaaggaaatgaacgattttgatttggatcttaaaaacagttctgaaggaagtatattcactgggtcacttgagaaatttttgtcacctctggcctaattcacctctggcctagttgttctcatagtgactctttcttaatgacctccaaaaatatattactattaatgctagatgatccaagcttgaaagggttggaggttatctttcagtggttttccgtaataacaatgagatctgttccccggctagaaaggatgagctgtggtctgtcttataccttactaacccccactcccacccagggctatacctggttacctaccctcctatgttactttctgtccctttactttgcgatcatggccataaggatgctggcagaatgaggctgaggccagtgtgagcatttgtgttggtactggcacatagatggcagataccaacacaggccaaataatgtgaatcttcctttaaagtaaaattaagaaagagttaagcaggcatacggtcagagagggacagtccctgccttcagccaaacttcctactccctgtagtaagtgactactccttagacctagtctttgtgtttttctaaaacattctttacatctcaggcagaatatacaaaatctattgttatgccctacctatagtctcatttgaattacctaatgaaagggaggagatgtatcaattaaaccaattgagttggtttttatttattcttcaattcattctaattacatacctttcttttaaaacatattagaaatttgacactgatcagttgcttcacaatagtaaatagcgatttatttttgcatacattacaatttcatcctcttgcctcggcactctatgcggcccctggttgtgaatcagtatttacctctgctgtaagaaggggctttgggagcccatcccacataaagggatgctctgtcatcctggacacattggggagggcctaggccctgcccaggatgataggacagactttggggaacctccatggaggggggatgaggtgggggactggtggggagttgggggaggggagagggagggggaagggattgacatgtgaagcagtcttgtttctaatttgaactaataaaaaataatctattggaaaaaaaaaacaatttcatcctccttaatcattatgaactcatggcctttcacaggcagccagttctaatcagctctgaacatgcagcttgctcattaaagcagtgttaccttgatttcccatgcttgtcttgatttctaccagttaaaaataccttacgaggcctggttcctttaatggggaatagagaccaaaatccaggtgctactgtctacatcaagcttttttctatgggcttcaggtcagcgcagtgagtcagatactattaatggacagagggataatattaaactcttagataacaattttccatttgcagtcttttccattccctgaccttctttatagatgttgagagcccattacttttacttattatttccccttttcctgtaagtttgatgttatataatgtggttagaggctgtatctgaatgcttgatgcatacacacataagtccataacatgattctaagttaagtttctttacagagttccctgacagaggcaaaacaggtctaaaaaccctgttttgcaaatctgtgaagatcagacacaatacacacaaaagaccaggccatgatattataggaatgcctaattataaaaattaatgctaaaagtaatttaaatggtaaagagctccctttttccatgggtttgaggtgggaaaacaatatcctagaggattttgtgaccttactaagatataattcttttgtttttccagacagtgtgtcatggatccctggttgaccccagactcactctgtagctgaggatggccttgaacagctgatcctgtttcttctaccacacatgctactcatttaaagtatataattcaatgttattttagaatatcagagttgtgcaatcaccatgaagacacattttagaacatgtaatttcctcacaaaagaatgttatacctactggcattcaccttagcctcccccactgaaaccttagcctccatcactaatctactcaaaattcatatgaaagtctccagttctgggcatttcatataagtgtgaagcataaatttaatatatttttatgtatcagccatttaattttataaatcttttgtcatgattaatatctattacatgatataacatttatttataggtttaggttggctgaacttttttttgtaaagacaggatctcactatgtagctttggttgccttgaaactcagagatctacctgcctctttgccttctgattgctgggattaaaggcatgtacatcttcacttgactatgttagcatcttttgtttattgtggataatgatgctatgggcatccatgaatgtttgttttgtttgatatacatttcttgagtatgtgtgatcattttaattgtcagcttgacacaatctagaatattctgggaagggagtctcagtttagatcacattggcctttgtgcatgtctgtgagaagacttctaaatcacactgatgaaaaggtccccactgtgggcagcaccatcccttgagttgggatctaggactgtgtaagaacagagaaaacagaacagaacaaaacaaaaggcaaaaaaaccaaaccaaccaaccaaccaaccaaccaaccaaacaaacaaacaaaaaacaggctgagtataggcacgcatgcattcatttctgtcttctctttactgtggatgtgactcattgcttcaaattcctccctgattccctttaagtgatgaactctaacctagtattgtaagccaaatgcacccccttcttccttaaagttgtttttttttgtcccaatatgttatcacagcaacagaaataaaactaatacagtatgtacacccagaagtgtagttgctgggtcctgtgtacttctacttataactttctgaacaactgctagattgtttccagcatggcctgaccattttatactcatttgaggaagatttgagtgcgttaccattacctagcttgtattgtggaggtggatacatttcattttttgtttgtcttactttcagataatttacataaatgaacaacaaacactcaaatataagaattaaaactaatataactcttttccaccatgcctgaaagatctctgtggtgcctactgaacattagattcctcgcttgctttactgagtaatgactaaagagactaattggcccaaactagaaagactccatgattgacataagctctagggtactatggtatagtacttgtggaagaaatatccaatccaggaggcactagtattaacagctgaaggaagctgagaccagactgggtactttttggaaactattgcctaagtacttttagaactttgtttttccttttaagataataagagttctaccacattttattttctgtttaagaacctcagatttctaagaagaatatcaaatcttacattaattttgaaatacccacattccttcccttcttgattctgaaagtctcttcagggctctgggaggtcatcaggagccatgtgacttcacataactttaagataatccatccttggtagatggacatcaagtctgtatgtctatgcaggtgtctactacattaggtgaacatctttagggacaaattcttacaaacatgggtgttgaagaagatagccttttaaaagaccatgatagcaccaataaggaactggcccaggccactgagacactgactcttctttcaggtaacctacaataaacatagctcactctaatactgacctgagcatgtccagcttttctccaccacctttctcttttgaatatgtgttctaggactttaaattaagcatgctaagaactgtccagccctacatgtacttcctataatatgtataggtaacgtgatacaatcccatgccttttttcttcagaaataccatggctttgtactaaccccatgctcttcccactcattctgagtcacaaacctttgtccacattcacctactcactgtgctgattggctttactctcaccaaggtatggaacccagttcatttaatcatagaggggcatcattttaatgttattttgatggttaacatacttctttcaggactttttccattactgaaaacatttgcttttgattgggctaaggatttgactcagaggcacagcacttccctagtatccttgaggccctgggtatgatccctgcaccagaaagcaaaagaaaaaatccaaataaaagcagaaaaagaaaatagcttaggaagagggctgaatagaggtgctctgtgcacaattctgccatagtaagggcaaggaacacagtattgcaaggagaaagactaggagaaaaggctggaagtcagcataaagcatagtaacccaaatcagcatggtaaatgtcaggtacagcctcatttcttactcccttgctgattagaggtaggggtgaatgaggaacagaaagggagtgggaaagtggcagtgaccccaatcatagcagcccatcagcagctccacctgtaggagaatggcgaagtcctcacaggctttgtaaacccagcaggggaagctggtaagttaaagagcaattgctttgctcaaaacaaggaaatcatgccctagtgccaaccagcaacagcagcctctgctagataccatactgggacaagcatgggctcctggtgttgctagaagccttgagcctgtgcttgtcccacaaggtagagaaatgccacctcaaggtcatgcaagttgaagtccaaagactgccatagactcaagcagattactgcgagtcccattagcacttgctctgctagaagaagggaagctctactctctagcttacaacctcaggactgtggcagctggttataaaactccaacatcattcatacctgtgccttggaaactaaggaatgtccaaagtgaattctatagatccagaaacacaactatcagtttttcaggccctgaaacaaatgtgcttaggaaatagcaagtaggaaaactattaccagctacctatactgaatttgtaggaactggggaaattcttgttcccaggcatggcatggtgtaggactacaaccactgttgaaataaagttacagccttaactgtccctctctcacatctatgaaaaagttccttcagctccaggatgggaactattgaggcttgaaatctagcatttgctgtacttgtcccacagcaactagggaagatcttagccacagctcaagaccttaggactacaattctgttacataaaaagttaccaagataaagtcccatagttccagagccatgattaccaatacaaaaagtcttgctctcatcatcacacatgaactaacattgttgtgtcctacaacttcagaactccaggtacagaagataaaagctccactgccaccatattcaaaccatgactcccaggcaaggtgacaatcatatctcaaacctctaggaatatacatatccatgctatagataagtgttaactatacataccccagaggatctagagaatcttcttcacagcacattgactgggtggcacatcttttgggataaaatttcttggtaatagttatggtgttccttggatctggatacagcaccatgtacggttctaaaatttggaagagttgctaccaatgttataagcccccatgtcattcaaaatctccccaaaggacccggggaaaattccccttcaccctcctcacttcaggtccgtggttgccagtgtcacagaaaccaacataacttaatttgtcctgtggaacatcagttacagagttgtagttacagagttgatgggacagctggccaggtatcactcacatacatcatgaggggtttggtgattgtctcattcatatactgtggggtggggctatagctgctccttagaaatccttagaatcacttatgaacggccccaaggagcctacaaacagactctgtataacctgcttcctcaagatcaacagttgttgacataaggccagcaccatcacagcttcatgtgtggtttaaggggaatgtatctttggaaacctgtgttaactgcaaagtcatctagttagttccatgaactgcagcagactagatgattacaaaactcataaacactgttgatatgtatcaaaactaaagaaaccaaaggatacttttgagctcacctatatttaaaattaaagcacttaggactttaactcccatctaaaaatatcttgcaaaagatactctgcttttttacagacacttgagaaacataacacctcttaaggaaaacataattatttctaagtacagccctatttgaagaacatgtatggaatgcatgaaaaggagttccaactaagatcccagggaatctcagaatcatgcaaaagaaaacagataaacaatataaacagatgagaaaattcaaaaaatgaatgagaaattcactaaaaaggcagaaatcataagaaggaatcaatttgacattatgaagttagaaccttaattaatgaaatgaaaatatcatgaaaatctttcaccacattgcagaaaaggaggaagaaagaagttttaaatttgtggatgaggacagatttttgagttaacatagttcaaacaggaaaaaaataaaacgaagaaagcccatgagatttataagattgcattaagcaaagaaatgtttccctgaaaagaatcccagggagaacataagaactaatgtttggagaacccattttataaaatctgagctgaaaaatacatccaaagtcttataaaagatgtagatacccagatacaagaagctcaaaggaccacaactagattcaacctcaagatgccatcaccaaggaacattacataggccaactgtcaagggctctagatcaaattcttaaagaaagtgcatcaagtcagatataagggagttagacttagcaggtttctgggaagaaactctaaatgctagaagagaacatgtggtttactcaaagtccttaggtaaaacaaaaccactaggcaagtatactataccaagcaaaaacaaataaacaaacaaaaaattttagagatgatggagaaataaatatcttctccaaattaatagaacttcagggaatcattatagatgatccagttatgaaacaaagtattacactagagataaatgttggtaaacatgatcatgctgaatatgccatgaaaacatatggctgtacaaaacttaatgccaaaaggggtaggaaaaagagaaggtcaaatactagtgtgacatacacccaccacatcagagacataagcatcaaggtagaaaggaatacataaaaaaatgttgagagtaagttcctacttgtcaacaataaccttgaaaccagggaggtgaccacgagagggggaaagatgtgtcaaggaagacaggaaggaaaatggaaaacatggacaagaaagcagaaagggggctactgggaatggaagggtataatgggggaagaaatggggaggatcatcagaaaattatattgaagatgttaaaatgaaaccaaatactttgtatattgattaaaaataaaaattaaaaatagtaagcttgaatgtaactggattatattagacacagcctgtctaaattggtgttattttaaaaagaagacctaattgtttgccacctataagaaactagtctggctggtaaagctatacataggcaaaattaagggtttaaaaaaggaaatgtgtaaatagaaatcaagagtgagtatggcaaactatagttatataagagaaagtagacttcaaataaaaactgtcgagagaaacaaaattcactatatgttgattaaaggatcaactaagcaaaacaaattgcaaatattttcagcatctgtagcacattgagtctcgtgagtttacagttgaatacttagccctaaataggtcatttatatcattcccctataaggttcaaggaaattacagaagaggagctataaggaaataagagcaagatgatagagagaagggctataaaataatgctaccttttgggcatggtgcatccattgcaagcatgagctagcatcagctaaggttgcctctactggtcctacataatgctgtgactatccttagttgatcatggatcatagtggaactcaaaaggcattacctctccctaatgtaatattacatagtggttgattttggtgcaatggtggtaattgtcttcatttatgtccagcaattagcctactgggttacaatggacagttccaaacacttgcatacatagctggaacttcttaaattcagtgagtcccaaaacaaaacaaaacaacacaatatgaatgtcagaagggggctttcagcaaaagagatgggagattgatgtggagtaggaaggagcttaaaagatgagaataaccagaatgtattaagtagatgaatgaaatttccaaaaacatgacaggtaactaatggtaaaaatgaaaacacatgtacaaaacaaatattactggattttaaggcaagttatgcagagagaaaatcagcaaagaaaccttgaacaactctctaaggcaaatagacttagaggcgttcatagagaatttctctaactgcacgatacatattccttttaccagagcatgtgacattctctaggaagcatgtatttggccacaaatcaaacattaatttaaaaagtttaagtcataacacatcttagaccacagtgaaataaaactatattagaacagcaagaacagaagcatagatattaaattgcatgacccaaaatgacctaggagtaattgaaaaaaagtctagaaacaaataaaatgaaaacacattatttcaaaaatctgtgtgatacgtcatctgcagaattgaaagggaaatgtataacaacaaatatatagtcccacacaaagaaacactgtagataagcaaataggaaaacacaagagcaaaccaaactctgaattactagaagaaaagaagtaaagatttgaacagaaatatattaaataaaaacttaaaataacagagttagagcaaataaaacaaattgtactcaaaaaaaggtgaatagaccccagaaccagagataaacaaaggagagctacaacatatacgccagaaatacaaaggatcatatgttaaaatagcgggagacatagaataaaataaattcctaaatgtggacagtctaccaaaatcgaataaagaggaaatagaaaaatctgaataaacctatatcattcaataaggttgcatattagttagaagaccactcagaaaaacattcaagactttgcttttttattgtttaattctacaaaatacttaaggaatattaattccaatgcttaacacagtttaaaattgaaattggagaaattctgccagcccttttttcccaagtccaatattattcttacatcaaaatcaggtaaagatacaagaaaagaaagttatgggtctgtagcttcactgaatatagaggtaaaagttctcaataaaaaacagcaagtcaagagcagagcatgatagtgcaagccattaatctcagcactcagtaggtagaggcatgcagatctccgtgagttcaaaaccagcttggtctacatagtgagttccaggatagtcatagctacataaagagacactgtctcaaaacaaaaacataagtgaaaaacaagaatgaagacaaaaacaatcacaataaatatcacatcagaatatgatcaggtggaacccatcctatggatagctcaatgaatgaaaatcaataaaggtgaaataacctcaaacaaatgagcatcaaacaaatgaataggaattaagtgacagcccctctacatacaaataaaacatttgtaagattcatatcccttcatgacaaattccaagaaacaaagaatagcaaaagacacctcaaaatagtagaggatgtacaggaaaacccatcaccaacatcaccctgatctgaatatataaggaaacccatcaccaatatcacactgctctgaatgtatatagaaagccaccaccaacatcacactgatctggatgcatacagaagcccactgccaacatcatgctgatctgggaaatgctgagagcattttctttaagaatgagaacaaggcatgacttttactttgaccacgcttaatatagtactagaagcctgagcaagggaaagaaaacattccaaattggaaaggaagaagtatccatatatgtagatgacatgattttatattggaaaccctaagcactctgtgggaaaattgttaagaatgataatgaatttagaaaagctgaagaaatacaaaactctagtgacatttttacacatcagcaataaacttgctgataaagaagccagcaaagcatcccttcataataacttgaaacctaaaataagttagacaagatacagcacataaataagccatccctataattaaaaaataaaatataaaacactgaaatcttgctgaggtgcaggccacaccagcccaaagaacaggtaggccgcacacctgcccatggaactctttcactcctttagtttggttcccaagtaccaaattctctgctactcttccctcccaactgcctaacccccaatgccatgtccccatccccagtgtaaatggacatccctgctcagtaataggcagaatacaccagccagaagaaaagataggcaaatctaggcaaaattactgctgggctagagaccacaccagcagccagaactccagatatactgcccacctatagacttcctccattctctccccctcctccactgtgttccagccaccccaactcaggtggagaccacatgctcaataaaaggtcaccctagttgccagaagtccattcacctactccagtggagactctttgctggaccagaggctatgctggctgtcagaactccaggctatgcagatcagaagaccagagaaaaaaaaaaacagaaatcaagaaacaaatctcctatccaacaaagacaaactcagaaatcagcatctagatctataatcaccctaaacccagatgcctagatagcagcataagaacacaatcaacagcagccaaagcaattgtcaccaccagaacccagctatcctacagcaggccctgaatattccaacacagcttatacaaaagaaaaagacagtaaacccaactttatgaagatgatagaggttcttaaagaggaaattataaattccttaaagaaatggaggaaaagactaacaaaaaagaagaaaatgagtaagtccaataaagaaagccaagaaaaagcaaacagttgaaggaaaatgaataacactgttcaagacctgaaaatggaaatagaagcaataaagaaaacacaaaatgaggaaattctggaaatggaaaatctaagtaactgaaaaggaactacagacataagcatcatcaccaaaatgcaagagatagaagagagaatctcaggcactgaagatatgatagaagaaaaggatacatcagtaaaggaaaatgttaaatctaaaaaatttctgacacaaacatccaagaaatctgggacacttgaaaagaccaaacctaagaataataggagtagaagaagaaacacagctcaaatgcttaggaaatattttcaacaagatcatagaaaaaaattttcttaacctatataagaaggcaatgcctttaaaggtataagcagcatacagagcatgaaatagattggactaggaaaaaagtcccctggctacatgataatcaggacactaaatataggagaaagaaagagtatgaaaaattcaagggaaaaagagccagtaacatacaaaggtagaactattagagtgacttctcaatggagactctcaaatccagaaaggtctggaaagatgtgcttcagattctaagagaccacagatgtctgctcagactactatacccagcaaaactttcaatccatactaagaagaagtaactgagccacatagcagaatatagatttaaaagaaatgtgttattgagttataagagctagttgacaaaaagcttaaactaaggccaagctttcattattaataataaacatctgggtcattatttgcaggccagtagttcgaagaaagcccaacaagaaaaattgctatatttggtgcccaatatggagcacataaatctacacaggggctgagaaagcaaagcaaaacaaaacaaaccaattacaaacagggcttcctggcaaccgaggtttccagtgctcagaatacaaaggcatggctcctttaatacagtcaagcacttgagtagcctgtgggctactggggcaggagacaacgtagaaacacctgcctcatcacagacatgacttctcaaagctggggcaggtaaatgtgagtctagggaggtgcctgctggcaggaagttaggctttcacagaactgagggaggcagagccagccaccagcatgccatgtgttaagctgagcctcagagtagtagcctagtagtttcagatttggctcacatggtcagaggaggctacagatgtgcagaaagtaaggttctggctaagaaaacctctgaaaaggttacaatgtgctttcaaaggtgcttagatgctgaagtaagaaaaaaaatggtatagacagtcatagaaaaatagtttaaaaataataaattctttaaagagagagtaaagtaattaatataaaaggaaagccacataaaggtgggaaatacacagggtgtcagttcctgtatgttgctttcttgactttaaattttttaaatgctaatgaaaaaagaatagctgctgagagacattggattaatcaaattgctaaattaaaacaacttttatattttaagaataccttaacttcagaatagaagtcagaaaatatattgcattgggggaaatgttatcttcaaaattaataaagagcatatttgattggtgaaggcctcctaaaaatatttgctatagacacgaagaaaaaaaaaacaaaacaagaaagtataagacagatgatatatatcctgatccctctacatgggaataactctgagactgggtgagacatgataaatcttgttggctacagagtcctcaggacagtttgcttatacaagccacacagactttcaaagttaaaagatgccttttgtctgctcaaacataaaacaaaaaaaatcatctttagctgacttgggcacactgcacattccatacttgtgttaatgcattgtgtgtgtgtgtgtgtgtgtgtgtgtgtgtgtgtgtgtgtgtgtgtgtgtgtgtgttaccttaaaaagtttgtgtgtgttcagaaaaaaaaataggaccagataccaatgaaaacaagtagcccaggtgatccagcttctcagaatgcctgtcacagtttctgtaaaattcagcatctaggatgatatcaacgcttctagctgagtagtctcacagactactccagtcaagatttcagatatgctctatgctttcccatcacacagatattaaacaaaaaacaatatagccagataccacagaatgtgactattcttccaaatttctcagggacactagaatgccatcatcccagacagcaggaagcaatctagagcacataatgcccacattcccaataggagtgaatgcttttttggtcagtcaatggattactcatgtttatcattgtttaggtgggttgattacaagttgctgttggtcatggtcaggaagaaaattgaacagagaagattcgattcagggatcttgttctgaaaagaaaaatgggtatatagaaatggtacgatgaaagggtaaattactaaatatattttaaagtaaaaaagcaactactattcttaaatattttacatttgtatggttttttatatgatatgaatttaaggttattttggctatgctgaatatatgtttctactcttgtttaaggtattgtgcctatgcagctcacttaaaagtataatgtaaatttctagtccttgaaaggtattataaactatttaagataattaaaaaatatggtgtggttatatgctatttatgatctattaaagcttgcctgaaggtacagaaagcaaatccagccaagaaatccagccatagaagccaagcagtgtacacccctttaatcccacagtagaggtagacaatctctgtaaattcaaggccacaccgagctatgcaaaattgagccagtcctaaagagaaacaggtcacacaaagatgatctcagtatttgggatcacacgcctttaatcccagcactagggaggtggagtctcatgtggagattgattctccagccacactaaggagaggcagcagtctgaggcttggtgagagcttgggagacaggatcagccctttcagcctcaggtagagaggtaagaggtagtggcttggctgcttctcttttctggtcttcagctggaagcttgaaccccaatatcagtctctgggtcttttatttgtcatgctacaacgcaggataagtcatctataacaatcaaacttgtagtcatgttagatatattttcaagatcaaacaaatattttagatagataggtggtcttcaaacacttcagagacatacagaatatggcatttaggatgttttaataacattaggcttttcatgacagtgaggtacacatctgctcctggcagcaccaatgtacttcaaaaaaggatgatggacattgaagaacctccatgtggagttttcttttattgtggaaaagttagccactgcgcatgaaagttgccttgcctcaacagctaacagtacgctgtccaaattggacaagcagggcacaaaggaaagtgactgactaactttgtcaagaaaatgtaggacagtccttcaaaattcctgcgtcaaaaaaagtctgtcagataatctaggcctgtaggctaaagatggatgccctaatgttgcagaggatctttgggtgactgtccaggttgtcagctgtctctattgtttatatagttttggaagttgtctgctctgcacttcctgtttgctcaggtcatgttatatcttcaaggttttgaaggggttaaagactagatagttatagttttccttcttgccaaattcagaaaagaaactcacaaaagagatgtgaagtgcataagtttaagagacataaagcttaatttatgtatgaagatgttttaaggtctaaaagatatttttatgatgacaatacaagctatgatagaaagtggcttagcataaatctttggactctctaagataggacagataatacagtactttgtctgaatttgccaaatgcaaatggacttgagtattctcacctgataatttttcttattgtgtatttaaaggttagagttaaaaacatttcctttttatttagaaggaggggaaatgttgtgggatatttgtacactgtgtgaaaatgtattgctgtgattggtgtaatgaaaagctgaatggccaatagctaagtgggaggtatatccaggaattctgggcagggaaaaagaaactgagaggagtctaggtgcatgaattcaccagcagattggggcaagtcggatgtgccatactaagaaaaggtaacaagacatgtggcagaatgtagatttaaaaatatgggttaattaagtaataaaagctagttttgaaaaagcttaagctaaggccaagctttcatagttaataagtctctgggtcattagttgtgggcgggcagtccgaagatagtctaacaagaaagcttgctacaattccccagaaaactaaagccataatgtcaacatgactaagcaatcttacctctgtatccagcagaaatgaaatcctacacaaaaggccccaatgcttctgtgtttactgtagcatcatccataacagcaaaagtcaggtgtgtaagaatggataaaaaattattcaactttcagtgagaataaaatattgtcactttcaataacatagatgaaactggagatgactaagtgaaataagccagacacagaaagacaggggccacatgttctcactcatgtgtggaaaaaatcagttgatcttgggatagaggtaactggagacagagatggaagggaaaaacaaaaatataaataaagttgtaccaaatgtagagaggcgagaagaattcaggtgtaccagcacattaggataactatggatcaaaaaatgtatatttcagtcaattagactctggctctccaaaagctaatatttgaaggtatgaattacttactatacattgtatagacataccaaactactataacatatccccaaaaagctgtataaatattatgtctcaattaaaaggaaaatatctttatccactgattagtaagaatagtgttttatacttcattaaggaggtcaaccagaggaaagtgtctttttactgtatttctaataacagtgctcaaatacatttgaattaatcaatgaaccagattatgagctattgtgacatgtcagtaaattaagggcttgttttagatgcaaactatcacttgattttatttttgtctgtttctaagaatcaaagccagcctcaaaagagtgcagttttactaccattttttagcaattcaaaactaaagaaattgcacatgtcaaatgtagttgcaaaaggtaagttcctaatgggacatgacttggagcaattgcagcatcattagaataaatctgtaacctctttcctggtgattgccttggaggagactttgtgttcccgtgtctaagctgtgatatgcttgttcaagaagagttgcacctgatagagttcacagactacagtttacagaagcttggaatgagcacaaggaaaggaatgctttccccagtcgctgattgtgatgaatctgagatacgggccaagaggggctcctgggatgcagaggctgaaaaaaaatagtctataggcataagtggaagactgctctcacaggtgcaaaagagaagatttaacaacttctgggatttttaaattagtgaaaaatatgactggttagcatgtgactgatacgaaagtgtttttggttcaatggaaggcattctgaactctgctcagaagccacgctcagttccctcctctctgatacaagaacagcatgatctggggatggtcatgtgatcatgctactttgtgcagacctgctttcacccctcattacatcactgttagccattgctgtatcttcctccattctctgtctctagagagttcaagaaagccatcttaatcttttcaccatcacactttattttgaaaagagattggtgcaaaacaagcacagagctgtaaaaagcaacatgaccgaagtactttgaggaatgtagatagtcacaggctgttttcattaaaaataaacataaaaccagagaaccaagttctaataaagggaataatggaataaaaaaaccctcaagtttatatttacatgcttggttcatgtctaacaggttaacatattagaataaatttccttttgtgttgatggccagtggatgggtttgctaacataattggctgaagttttattgttacacttagaatcatatgagtatgttcatgaatactccatgttgcagcaggcttcccaacttgtcactccctaatatggtttagttatgaaaagactggatttaataccttatccttttctttagtcccttgtgctctagtggagaggattgctatctcctcctgccttgaagttaatttgagtcattactcagtgctaaagagcacatttcttaagctatccagcatggtaccaggttcctgcctggggcttgtttccatggtttatcagtcatcctgcatctatctctacaaaggcataaacatatctttttgtgcctctgttggcctagagactagcagatgatgccagttcttgtggagatacagcaaatgctttgcaatgttgtgaatctgcaggataatagctttgacctgttatgggtttcctgtatacagcattggcacttctagtgaaatgactccagaatggatgagttaaatggaacacaaaacatcataccaccactgcattgtcagggaatgcttagtctaattgccaagtggccttcaataaactcaagccagtcagcactcatcatggtatattgtaggattggataaggccctccctgtttattttattcacctttatccttgaaaagtgattgttcccaaggataactccagttgattatccagaagtgtcaaggaagattaatatctcaccgaacattatacatcatcttttttttctcatttggggccctgggagcaatgtcctttcctgctcctggctgccacagaagctaggtttcttgtgttgtgtttacagagaaatatatttctggatgtctgtgtactgtacaggttagtagatagcatgacagcagttaggactgccaaacccatagctggtttgatgcatctgggatgctgccaggggtcagattcatggaatgcccattaaatggctatccaagaaaagacaaccagaaatagttaaagcttgtacctcccacctcagatgcagcagagggagaacaaggtgaaacccagagattcttagcatagctgtttcagatgagagctgccatcatttcccacctgtgtggtgttcaaaatgtgatgtgggcttggtatacagcttactgtcccagttccttattacaaaggctaggggttcaaatacctccaccacacaaataaacacaacaaaacttactggcaacagtaacaagtacaaatctctgttctgtgtatagcatgggtttagattaagtatcaaagaaccccagtctcccaaactatctttacctccttcagccttatacactaactgagaaactttgaaggtagggtattaatgagtttactagatccgagataaatgattaatgggtatcttattggggaaaaacttacatagataatagtaaagaattgccatggcgttcctactccagaaggtgcagtctctgcctttctgttgctctctgtgacccaagtgagagtgccctccccacttctctaccttcaagcagtcacagctgcacctgaagccacgcccaaaggtatgtggccacttacaaaacctttattccgatttctttttatacgtaagtagacagtgatagtacttggcttgccatttgtgagaagcattaaatctcacattacacgaaaggttctttgtaatctgctaaatattgaggggctataagggacatcaactctgtgccagcattgtgcaccacactgccctggtctggattccatagttgacataggttcacagcagcatctgctgtcccactttatctagctgtcttctactttcttctcaccttccttttttttttagaatgatccctgccttcaggcatacagccttctaacccacctctgcttctgtatatgtcttgaggcctagcttatccttgtgttctcaatcaatgtgttgtgttgcctccttatagctcagttcctttccccttttctaggattcagccaaatatttccagaacatgtcaggtctaaacggatttcatgatggatttaatatttaatccaaatggaatttgcttttgtatttgactaagattaagaaactagctttggccttatataagggattttttttttacaagtttaaagtaagaattcttgggttgaaagagaaatacagcaattagaagtcaataacagcctcagactaaactagcttaatgaagtcttcaatttggaaatgggccagagagcaacaagagtaataagcaagtgtactttccaaaggccttttcagtctgcagttatggctaattattaattttgatgtactaataggatgaaattttattataacatgtataaagagaaaagtaaccattaggaaacctgagaatgatattagagttccaaggtgaacaaggaagagcacagtgggtataaataggagctagaccaagccaagcagagaaggaactagagaaaatcaagtcattgcaaatgtaacaaagatagccacagacttctgggcaactgtgaaacagattgttgatctcagcagtggaaacaaatgagatataattagactacacctgtaatcacaaatgctctgggcacctggagcttatcctaatggtggttttgcaagaagcccacctccatgcttcaaagaacctatatcaaggttgtaaataatctctaaacactcaaaagacagcatactcacagactgacgttttctgctagcctccgtcatgtgcaaaatgttttttatagcacatttgagatgctggttcaaacgtagagtccttagacttctggccaaacacagcaactacagagagcttccccctggctatcctgctatattttcatccttctttgtcctcacatgtgcaaagcctccagctgaacaaactgaatgttcaagttccagcaatatccccaacaacttctgtcttcaggcctgcttctgtggtgagcgctaggtagcccaggttagtgagtttcagtgtagctgggggataatccattcatcctgcaggagattcaaggctctagagctgttccatttatggttgcaggggtggaagtaggggtgaggctgacagtggggaacactcaagttcccttggccttgcagccttggtgactcccagctttgggtgctctgttccaaaataagccttagaatgttctcttttcatttataaaaactcaaggaatatctaaaaggcattaccccatgcacatgttctgagcacctagctacagacagcctaatgtctgaaacagagatactgtgagaccattagtttccagaacctcgtaggccgtttcatgcgtgctttttgttagtaaacacactggaaatggagacatatagagtggtaggcgactgaaggaccccaaaccagagctggtccatgaaccaccccagaacttgcttacttggagtctagagatgagcagcaggatggccagatgctctttgctacaaggaggcctctgcctggcaccttctttcttcctctggtttacagagcatgctgggctcccttcatactgtaaaacgcttagcctccaggtgtctttgatttctgtggcctgtaggacttcaaccaggcacaaaggagagggaaacctgatgcagacctaggccttaatcagttctgtggaggacccagggaaatcatggagcccagagatggaatgattgggtttattcagaggaccagtaattccttattggatcctcctgcgttcatccctacatgccaacagaaccttgtggaaattaaaacagagggctccaggccacacaaggactcagtcttaattggagaaaattagatcacagccatcactccacagtttgtcatccttacccgcaatacaaacctcacagacagcgctttctggtaaactgcctttgaaggacagggcctctcatcttggcttcttggaaatgccaaaagtaaatgggaccaggacactcttcactgtggagctgaaaccactggaggtgaaaatacaaatggagtgccttaaattgttcacgtttctccttcagaagggtttaaatggtgtctttcaaataactgtttttctcaaatcacaaaaacaaaaggcaaaccaaaacaaaccaacagccaccgagagcagacaattttccgctcagctgaggcaccacttaccgaattgcagccaagagtgatttttatagccaagttataaatggctggaaatcgggaggttttgatggaaatgccggctgacctttagctgtattgacgctggagagtgctactatgataaaaacgccccgtctccctccacctgggctccccaagctccttaattctagtaaataatgggctgcactctcactggagctagtcagtgaagcagctaggaggatatgattaaggaataaaattccatcctgggtcaggaagcaagactgtgctttggtgcctgaccagtgaactgggcaaaagaagcctttgaatggaccagttctcttcggctagcagtgaaatggttaattacctcttattctcacttcttctgtggaaatcacctgggagggcctgaggttctctagggcagagtctaggtgaaaactcttggtgtaaacagtaccctttgcccagagctggcttcttcctttcccattatgagggatgagagatgttcatgatgaacactctctttgcattaaggtgtggtacagacccagtacatttgtctctcagatctgttcagttgctacaaattaaacagagatgttccacattacttctgagagatgcaattttagcttccccccatgtgaaaccaaggtcacttcctttaaagtgctcataaaaaacgaaggcttttgtcatcgatttcaatcagattgctctcaaagattttttttttcacccttccccatacctagtaaaacatatgttcccatgttcccatctattaagttctttgaacatcagagctatgggggggaaaggtcaaataatacattttggcacatttttcattttgtcacttgccatcaagattttgtagatggaaaaaagttgacaactgcccttgaaaatatgagaatatgtagatttttttcccgccttgacaggtccccctgccttagtctcacaaatcaggcagtctctgtattctatgaaatgtaaagtgtagttgcatgactttccataaacttcgttgctaacatatttttcctcttgtattcctttaatatatgcaaagtgccaagctcctccaaagaatgttacaggtcattttcctgccataatagtcgaatcagcagcaaaggcacttcatggtttaaatgcggtgacagctgtagtctgacagcagaaatatgtactggatgggaacttccccaaaagccttgagattttcacatgagtagagattatggctgtggaaatcactttctcctaaagagatgtgtccctgtgtaaatatgattgaagagcatttattggttctgaactgtcaagtgcccttgacctagtgacactgatttcccaccattgtttttacatgcattgctccaagaggacagaaacacaatggctgtctcacttaacaattaattttcatcagttctatgaaccaccaagcctcacagaagccccagaaagcagccccctctctctcactcacactccctatgtgtacaaacacttgtgtctttctcttccaaccacaaccttaagacatctagtctgtaaaaagctttgttttcttctgatcagtgagtattttgatattaaaaagttgcacaagtgaaacattaagatggatttgagtgcagttgttgatgtgattagttcttcataaagaacaaagttaaatgaaaatgcagtagttataaaaagacaaccatcccctcccttgtataaataggaggactttgattacttgcattcctgttgtgttctcagttgtctggacaattccttttgctataaatcctaccagatgccaaagcatacacatttttgagacaagagtgtgaaggagagtcttttattactatctgttgcatctctgtctttggactatacatgcattatctgggtcttaatcagtggagggtgctgttgagatgatctttatttattatcgacatctacttgaaccctgtgccaggaaaagtcctcaggtaattacattgaacttttttttaaaaaataaagattatgtcatacagatgttattggataagtaagaagtttctgagtctctctacagatctgagaatttttagctgaggaaacttaattgactaagccctattttactgtccacggcatggtgatttgttttgaattgccactatgcagaatggaatagcaattgtttacttttatacctattcatgctagggaataaatgaagagtaactacagttagtactttgtattagcaagcatgcacattctggggttaaccttctcactgcaattggagtgatcctattgttttaatactttaaaacatttacttgtttatgattatgtgtatgggtgttttgcctgcatgttttgtttgggtaccatgtgtatgcctggtgctcacctcagcaataagagggtatcagatcccttgggactggagtgacctacagttttgagctgctgtgtgagtgctggaaactaatcatggatccccctggaagagaagccacttctcccaatcactgagccacgactccagcccctgttttcttgttttaaagtgatacttctgtcatgatatacctccttccaagtacaggattagcaaatggccttagaattttatcattcatggcacttaaaataagagaccaaagtattggaccctttaggttttgatactttttatcagtgtagctttaaattttcttcttgttccactttcattcattcttattcttgcttgtcttaaataattgtgaaaacatagaatccttagggaataatataaccagaactttgtatcatttattgttgctgtggaacatatcaactcaatattcagtggcttagagcactaatcaggtgttatttctttggggtacagaaatccatggggagtgctgatgcttatccagtctgggcttgctcatatatctgtcatcagctgtcgaatcagcctggcaaaggtaagaacaggccagtatgatggtcacagctggggccccacagctctgctctgcatagcctctcatcctccagtaagccaattcaagactgtttccaccgtggaggcagacatccagaagtgagagacaagtagacatgacctcttgaaactaaatacagcactgacaccagttatagactcattgctttctatggactagaatggtgcttttaaaaacatgtatgcacatgcgtgtgtgcctgcctgcatgtgtgcctgcctgcatgtgtgcgtgcatgcatgtgtacgtgtgagtgcgtgcgtgcgtgcgtgcgtgcgtgcgtgcatgcatgcgtgcgtgtgtgtgtgtgtgtgtgtgtgtgtgtgtgtgtgtgtgtgtgtgttgtgtgtatactacacttttaaaacttggggtgggtggacggagctgggaagagtctgtggtctggttggccatccagtctatctgaattgtcaactccaggcccagtgagagagcctgtgtgtaaaactaagataaacaattgagaaagcattgaacatcaatctatggacttcacagccatgcatgtgtttatgtatatgtttgcacacatgtgtacacatgaatacatagacaacaaaaacaaattgttaaatataataagtgatcctatttgcagattcttaattgcaactgacctggttgtggtgaatgggacctataagaaaggtctaaatcccctcgtttatctttatattatatttatattttgattgagagtaatatgataaatgttcacacacataaaagaggtcaggaatatttttatggtaggttaattgcttctttaacctctattaagttctatctgcatccatgcctataatgctatattaacacacatatacatataatgttagtttttaaatgtttctgaaaaatttgctgcaaattttgcctccaaacatgagaaagtgtctcatagtccttatacttgaatgtaggttgccttgtagatccttattaacaattagagtacagtggaaccgctcatgagatcacggggcccatatcctctgtctgactttcatcttgttgggatgttcaccttggtgactgagtcaacacataagaaattcagctgagtctaccatgctgaagagctcacttctgcatagagaaatgcccaggatttccagtccccaggtgcagaggaaagaatgatcaaggctctgttgattataccttcccccagtgactgagtggaatagaaatgacaatgccctttgaagcacacccaacctgaaggctgagctctgagtttgtcaactcagcttgctacagtaacacaccatgggctagtggcttagataatacaaacatatcccctcttttattgaaaatagagttttttcttgcaacaatactgatattctgactacagtttcccttcccagttactctccttcttccctcttctccagatccattccttttgtctctcattataaaaagaacaggcttctaagacataaaaaccaaatatgacaaaataaaatgtaacaagataaaacaaaaaccatcatattgagactgagaaaaacaagagatagaaaagagtccccaaaagcaggctcaggaatcagagacccacttgttcatacattcaggaattccataaaaatactaagctgaaagctataatagatatgcagaggaccaggtgaaggcccatgatttgttctacaacaataacaatggggattcttactgcacagtagagttttgggtagtaaatagtggaataatgttatcatacctaatctgtaatttcactttctgctggacatgctttgagacatatctatctggtgatgcatgaatacattacttgcttaattgatgcacttgatggaagtcaacaggacttaccttggtcatgaactttgggttgctttgaagttttgtagaaattacaaataaacatgccttgcacttttattttctttccttgtggagcatggacctttccaaaccatttctttggttacgtgtgcacactgttttagggactcttacactattaattgtatgacctgttcatcgatcctcacttcctctttactgactgactagcactgaagactgtaaggctgatagacaatgctagtatgcacttactcagtttctgtcaccctcagagtttgtgaagctgtgaggctttgaaaaataatttctttatgatttgaataccttttcctctactttgagggtatatattctttttcttttaagcctttcttatttatttttaggatcactctaatgccattgaggcattatattttcctgctctatatatgttgaattttcccagtgtttacattgtaaccttttttggtttatattccattagaggagcttaaataaattaatcatctataagtttatacatacatgatcatattataatactttatagctacaattttatcttgaaaagtttagatgttatgccctttaagaattccttccttattttggcattgcatttttcccttggccttaaatggaagaatactattttgttgctgatattttagagctatgttttttaatgaactaataatttccattttttaacaatcagaagatataattacaaatcatttttcatacttctaagattgattgggcagtacagaaatttacaaaatatcagtgagtaactggacaagaaatgaagtcttccaaactttccatggtgcttgttgggtctgtgtcatctggcagtgtggtagagaaaagtttatcttaaaggtggtccttgtaagtcagaaggcctcttgttctgaaatgtcttcttggcccgtgttttatatagtatgtagcagaccagtgatggtaattttactagtattacaaattatacattttattctttagtactgcagtaaatttgaagactgtgttcagaaaataatataaagtattgtaagtattttataatataaataatataagggttagaggaaagcaaaatgggacatttctaaatgacttatatagtatacttccctttcttaggtcatgacacttatatgacacatatattaccatttgtctaggatgttgatggcacacacactttatagaaatgagatgttttagtttgatataagtacaggtgctgtgggcaacatgctgtacacaggctgcccttatttaacctggtcacataaatgttaatatactcatttttagtagagaataatgaaatgggtacttggtagtcaagggagaaatgtcaaaactactgatgatacaccactcccaccctacctttatcttgccatctgttgctgtcataccttatgtcaaaacacattgttcaagtccatggttagataaccccaggcaagatggatgaaagtgatgctctatggagactgtggcttcatcttgccttgggtgcatctgatgtggctgatgaagagcatgcttcttttctctcagtgcttctcagcatttctggaagctccggggccctgagctgtgcatgagttgtatctataaaaaaaaatgcaaggccctgggatgccctctcagtgctattgaagacacagcagagcacaatgcgaagaccctctttatccccatgttgccaccaactctctctgtgaattttgcacaatgattaaactttgcaaatttggccatgtgtcccttagtgaagagataaatatagagaaatgtgctaatttcgcctgtatgtgtacatcatggagagtatgttcataatttagatggcataggttgaacatttgttgtaatcaagaaatttggtaaaatgagatatataagattgctgtcagtaagacacagtgtcctgtttcacaatgaacttttaaaaactaagactatgcactaaagcacaatacaaatcatagcaaatgcataaatgagaaacatagtcatttattgtcattaccaagtcctttttcaatacagaggactgtttgtggcccataatctaataccactcagtctgggaagctctgtaggtttgtttgcaccagcattgtcataaacatatgcaaaatgaatttacggcactaccacatcatcacagctgtgtagtcattaggctgtaggagttttgcagttccattataatcttttggggctaccatccaaagtatggtctgctgttaattgaaatgtcattttaccatgcatgatggcaaagaaatggtcattgagttctgtcataattacatatactatcatctccttcattgattgggggagagagagagagagagagagagagagagagagagagagagagagagagagagagagagagagagagagagagagattattaatacatttttgtcccttctgtaggcactaaaatatgttttgagaagaggagagctttgggtttctgtgctctctaggcctgcaagattggaatctagcaggtgtgattcctttcaggactgcacagcacttgtgcagctctaattaggcttaaaatggttagcctgccacttccttctcacttccaaatgccacgggatgctcgttctgtgctgtatcgaggcttatgatcagagcatttgggcatggtgaggaagactttgaaaggtggacaagtctgtttagaagctgcctcctgtctaactgtggtagatgctctgtactctccagtggcaaagactgcttcagggtaatggactggctgaacaggtatttcacagagtaccatggaagaaaaggctatttgtttagttttccatattaaatgacaatgcatattagcagactggaaatattagtaactcaatcacaggaataaagcagatttcacacttaaactcagaattactgacaaacacaagcctgaattgatgggattctgttccatgagagctacaaggccctgtagaagtaaatcacaggcagtggcttctgctgaacaggacataattctgcgggctcatgtggacctcttttattctgcctaatggtgctttagaattttcaggtatggaaatataactgctaataccagtggaagacaagcccaaagtttctgtgcttaagacaatggttatggttggtttaaggtcaatttcccacaaattagaattgtgctagtggggagcttcctctgaagaagtgttctgatagttttgatcaatataggaagacccacccaatctggctgtgggtaggaccatcaagaagcagtccactttaaagaggcatggcagaaggaagataaacttcctttctgttctttgactttcctccttgctgtgaggaaacttgccctattgctgctgctaattctttcactgctatcagaaccaacatttccagtcttccatgatggactagggactaggggctctccaggaagctccccggtttatagggccagattgggactgctgaggcatgcagcctagtagactgagtaactattggccctccaatgagagaaagtcatacagtcatagaggactactctgactgctgaggtatccagccttaagaactgaataacagccaggttgtcagttttcagatgtgattctgttcttaatatttcaaagctgatttaataaattaatttatctatgtatctatgtatcaatcaatcatccattatctatctaccacctatgcatctatctatctatctgtccatctatctatcatctatttaatctaaccaatcagttgtgttccactagagaaaccctgaccaatacaataactaatctagacatattagacatgatccaatgtgagctcatctaaacactgaagtcaagattctggtgcttggacctgggtcaactgcttggttaataagactgcttcctgaatgaaaacaaaagaaaagaaaggaaaaaaaagaggaaggttatgactgctcctacatgtggtggagggaaatgtttattgtagataaaagggagagcatagccaaaggagcatgaactctaattgttcttaataataaaaacttggagtcagctttcaggcagtgaaaactgaagaattagggaagcagagcaaccagtcactagagttcttatctctatcaatgctcagaccaaaagggcaatcctatccctatgaatcctcagactgactgtatctcagacagaatcctcagattccatctgtctctatgaaacttcagactgactgcttagactgcaatgagctcctgtctcctcccatcttagattcctctctccacccaaacacatctctttctgtctccacctccttagtgctgggtttaaaggcctgtgacttccaagtactgagattgaaggtgtgagccaccactgcttgactctgtttctcttttagtctgaatcaattttgtgtagctcagggtggccttgaactaatagagatccatctgcctctgtctccctaatattgggatcaaaggtgtgtgccaccactccctggcctcaatggttaactagtttggtgatctctgcactcaggtcttcaggcaagctttatttgttagatcataaacaaaatatcaccacaatgggagagtccagagtggtcatgaccctaagctatgtgagaagaggggagggagagaggaaccaggtataacagacaagaggtcaaaagctaaaaatggattgagtaaccaaaatggctagattatatagggaagagcctctgggggaaggacaggctagcctctgggctggagagttcagatagagggtggggtctgccagccattctctgtaacaggtaggtactgagggatgctgggagaacctggtggctaggtttgcttttatatactaaataggcacctcagccttttattccaggatttgagacttaacagttcttacactctagcatgtggacctgagttcagatccccagcacccatgttaaaagtcaaatatatctgcatgtcctgaggtggggatggagattatagaatcactggagctttttggcaaccagtctagcaaaaacaaaaataaacaaacaaacaaaaaactgagatccctgccttgaaggaattaaatcagagattgatggaggttgtccttttctggcttccacaagtgtacatcaaccccaaacacacacacacacacacacacacacacacacacacacacacacacacacacacacacaccacaccacacatgtgtatgcacacctacactccccacacactttctgaagctcaagggcattcctccaggcatggattacatgcttatgtggaagttgttttctttaagggaactgaatataagagatggggtttcagatatctcattaagtatttggaatgtggttttcagatgttcccatcaatagtaaagcaaaaatttcagtaggaagctaaaacgcaaacagtgtagagagctgaatgagaaatagttccccatagtctcaggtatttgaacacttattcctcagatggtggcactgctttgtgcttgtgattgagttgcaaactccaagctttctgtttcagccaccatgcctactacctgccatgctgtctgtctccattattagggactctaattctgtggacccctaaccaaaataaatcctgccttctctaagttgtctttgccatgctattttagcacactgattgcaaattgactaatacattcagcagtaagtaaagagcaaactttctatggaggagatgtagtgtctgttagcagtcaccggtgatatgatagctgtcacagagcagtctaatctgatcatcagggatagggacacgcatggatcataggtggaaggaacagttgtaggaaccccagtgagaatacttccagagtggctcaaaaattgaactcacattcttacagtgattctcatccaaatgctgttcttcagaaagattgacatcattcctgagtaattttagcctcgtcccatgtgatggaatatactttcaaacatctttctcttattcagatggcagagaaaattaaattgtcacatctcattttcactcttgtagaaatgtacaagattatttaaattaggaatcaatccaaactctgactcataaaaaattcaccattgcctggtatgcttttggcctgaggcaaacgttcattggctgactcaggatccttgcaaacaaggcagtggtaattcctaaattcctaggaagaaccagcaggtatctcctaacaaaaatttaatggagagggtacccgttgtgttaattttgattagtaataggtattgtgagaaatttgcctactgtgtggggcaaatatccatagcttatttggtatattgataaaatgtgaagtttgagcttgctttgagcctcagatttttagatcaaggtttttaaactattagctgtatatgcatgcatgttaaaatattcagaatattaaatccaactatggagattatttacttcaaggattaccagaactatgattaaaaatatctcaagccaaagaaattgacaagccagccacacaggccaacatttactttgtaagattggcacatatgataagtctcctggacccaggcttacaccttcattatagacacagttcttattcagtacacactgctacttttgtgtggaattaaaacagactttcttatgatgagatcatataggtgaaaaatatccctcaagtgtttcttttgagccccagccactcacagggatgatatcttactgctgtagacttccccagactagctattctgagtacctcttttaggctgttctacttagcaaatacacttaaacacttgggcataactgccttttgtacacttccccttaccagacagatctctgaaagcatagtccacagtctttgacacagcatctaacccgatcctcacctaggttgacatttattgaattaaaaaataagtttcctaggaaacatattccaagttatgaatcacaatttttgttgcatctgtaatatatggtaatcatggtgctttgcacaagtagatgttgaaaagaaacatggttccacatggaccagtggtatattttaaaaaggactgtgtgcttggcaaggcaaaatgaggggtgcactgcagtttccagaggttactgagtctgcagagtctcccacaagttcagctgaccatagccggttatgatgaactgaagttgaactctgaactatgtgggtctaatgctgtctaggatctatgcacagggacacagaagggagtttagatcaacaggttatttagcaaagggagaaagaactgtgtaactcaattttagagtatcttgtataccagtctgtaccagtaacaatgggctgattattcacaggcactgtcttgggttagttttcataagaaatattctaagatatatatgtgtttgcaaggcttagggagcatacttttgggtctagcacttgtagcttagttttaaaaaaaatgtagaattgagatgggaaaaattgaactgagttgccatacccactaaagcctcaaccaatcccacataaaagtctaaagcttggattactatgcagatttatgtcacttcgcagaaaggaggctggccttgatgctcctgaatctataagtaattgaatgtggattgttacaagtaggggagtgatgtaaaatgtgggaatggttcatgtctcaaaggattcagtggtaagctaatcagaatctagcactcgtaagagctcatggagcagtgcctgggacaaactggcaaatacatcaaaatagccgctgtacactctgctttgttctctcctacaaaagaaaataaaaccttctgttctagtttgcttgtctgttactgtgttaaaatgctaaccaaaaggaacttggagggtgaagatatttgtttgatcttacacttccaggtaacagttgatcactgagggaagttagggcaggaactgaagcagagaccacaaaagaatgcttcttactggcttgctctctctggctcactttgttacttttttttatatggcccagagccacttgcctagaaatggtactgcccatgataggctgttccctatcatgcatcattaatcaggaaaatgcccaacatggatgtctatcatggatgaaatttctcagttgtggttcctttcccctcgaaactctaggttatgccagtgtatcaaaagtatatcaaaagcccacccttccagacttatcttcaaacacatccacactggaagttagggcttcatcatatgaatttagagggcagcacaaatattcagttcacaatcaagagtacaagctcttctgcaatgatgcacatagactgtcatagtgtggcaggaatgactgtcctatgacaggacaagtgagcagcactggaaagaggattggattcctgcagtagtcaagagtgttgggatagcaggactggagctctgtactcatgcaggaatgtcaggaaacccaacccccacctaagaggacatcagttgttcatggcagtagcaatacacattccatatttcgataactatgtatttaagtttccttaaagcctgggatgttgagtgcctgaagaattacaattcctttttgatgcccagtgggtgacaggtcactggctggcacaagcaggcttgggtgaagaaacaatgctgccctttgacccaatttcctgtcataatttggattgttttctctaagcattttctttggagtcttctacttagggaagcataagactcaaaatagttctgtatttatgaacagaataaaattatagcgagatgttcatttactgataagaaagttgtgtaagtcagtgccttcttttaaaacccaaatcacatgttacaaaaggaacatatgttaattatagaaatttatctataacacgtttttgctctactttggtttgtatgacttttaaaaagctagatgggatcatactatgtttatgaactgaatatcaaattttttataaattaaatatagtatgctacaatagccacatttgtaatttcagcacccacttcaaatttacccttggctacatagtgagtttgaggccaacctgagctacataaagccctatcttaaaagaaaccaaccacaaacaaatagaagaaggatacgacaacactgcactattttctcaactctctctgatttatttatcagttttctacattgggatattagaattgcatctaattgtgaattgttatagaaagtgttttggtgaatgtattttgagtagatagcttgtgcagtcttgatttctttatgatgaagttgtaaaaacaaaattcctgtatcacatggcatgaaaacattatttccaaataccaatgcagaaaatttgtaatcatatacactctctacagcagtgtggtttttacaacattatttttaaaaccagcattgcaggagataaatagcaatacattatcttaataatcatttttgactgttaatcagatgtaactttcctttctttccagtgcctggaatgaaactaacgtccttatgtgagctaggcagctgttctagtgctggctcttatcctcagcctgagagctaacatttttagctttttgtttacttgttatgataggatattttctttagagtttataaaagcctcatacattgcccttatgctgtcagttcctttgtaacaattatttttccattctcttcagttttattcataatttgattaaattttattctctgttcttgatcttagtggttacaaagccttactccagtttacatttccagtatgtgtggtttacaatgaaagagggtgtccatctgttacttgtgtctctggtcttttcagtgaccatgcatgaagggtagacaagtacctcggaaaaatgctcaggtggagatatgttcctgattttaatgaagtatcttacatgtttggaaaatactctcttaaatgaacaaaaggagttagatacctttgtgctacttagacatatctcctggcacccatgtatgttggctcttgattcaggaatgaagtggactagctgagagggcagaaaaaggagtcagcaagagccacatagatgtccttgtccttgatgtgactaacttgtaataggagtctgtaagtccaataatgctggagaggtttctcagtggtcaagagcacttactgctcttacagaggacccaggtttggtttccatcactcatcaggtggtttacaactgcctgcaagtccacactcagatccagttagctctagtatttttcattcttcaagtgacaagtccagttttgcttcctgatttttctatgttatgttctaaatcctccaaatacccaaatgtgggagtgtttgcctttttattttctaactttactgttcatatggaccttatgatacaatttgaagttgtctggtttttatactatttaatgtagaaattacatgttttgaacattttctattgttttatgacttattttcagtgttttattattttttttgtgtgtgagagagagatagaagggggaaggcatgggtacccagagagaacatcaaataccttgaagttgcaggaggttgtgaaatgccttatgtgtactggaagagccttaagtgcatccacacctgggtcctctagaagactaataagtgctcttaactactgagccacctctaatctccttatatggctttaagacttctattacaatggatttacatctccgaacatctcattttagttgaacaaggagactcactctatactgtgaaaatgtgtgatgatttctcatgtgtgtaagagaagtatagtttggcatcaaagatctgtttgtcttaaaagacacaaaatagtttaaatgcgtatcttttaatgaactatgcatagcaaatgtaaatataactaatatttgctagcatacttaaatttgacttgggccttgaattaaagaactgaacgtgaatgtcaactctgcctctgacctgtcatgttagtggttgggtctgaatgtggataaggtacatcaaagcaaaatgatccaattttctggaaagaactgcaagatttaatttcaatccccttccaactcaagccctgatggcaagggtgggagggaacccgaagccaaaccataacttatcgagtagaaaccacaatttggttatactagagctgttttgttttaggaatagtttgctggtttttatccataatattaaacttggaacaagtgaacctgtgtcacatgtggcaagaagaaaaagccagaggagaattctccatgtctaacccctgtaagtttgcaggagggtgcagcattgtcattttttttttttttgctgtcaatattgagccactgtgccatgctagtaggtagctgtaagcagctgtcatttacaacaccataggtgagcagagacatagctattatatgtatttggggcaaaattccacttgttctggccccatggtcagttttgactccaatattctattctcctgacacgtgggtaatctctcattgacatctggacgtgttgttctgggaaagcataatattagcacggagattctccatgtgtatctgaaagaaggctttgccagtaatttgtgagggttttgtgaagctctttgggatccttctagaaaaagaaccttctataaacctcagttattataatgatgactgctggctgaatcgaagttacacatgtgcatctggaggacaatatatcctctgtgctcacataaacttccatttatctatacaaatatctttgaaaagagtgaggctggaatgtcttctccccagctggggtgttgttctgtttctgcagtgcagtaaactgggtcaccgtccagctttgcatcaagcacctgctcagccacagaatggggaaatgagtgcttctatagtgatagtggcagcgtggtgcaaagcccgtgccctgccatcgctggggacagctaataaggagtccaggagagctgatcattcagattgctgcctttgtcccgcttgtctggagggaagacattactaaaaggaaaattgttcttttaactttcacttctgagctcttcctgtgctctctgaagacagtgatttttaaaggttagattttaccagtatgcgccaatttcaagaagaaaatatctctaatgcacaggaatactgggaactataaacttttggggaggtgaaaagtagtgctctaaaatggattagaaaagatttgatgaataaatggaatcctgggtataactgaatgagagctagaggtgaagtcagaattcatatctctcttcctcttccttactccctccctctttctctctccctccatctaatctatctatctatctatctatctatctatctatctatctatctatctatctatctatctttatctatctatctatctatctatctatctatcatatctatcatctatatctatatgtctatcatctatgtgtcatttgtctctagttctcttatttttggggggacagggtgtcataaaatgcaatgtagccccacatttctatgcagcctaggatgacctcaatgtctggtcccactttctcacactgctaagtgctgagattgtaagtgtgcatccccaagcctaggcttagactttacaccttgcatctaccactgacatgaactgaaactttgtctcattttccagtactgtaaaatggcaagttagtatgaagctgaagcagagtacctggaatatgatgggtggtcattaattgtccattaaatccaggaagggatttagtgatggagggtttctttcagtcagcataggtaggtaacatgaaagctccatatctcaggggactaatatgaaaggtttctttctctggtgtatttcatgttcctgtaggtcaattatcaagccaacattgttctcagtctgttgctcaggtccactagctggccgtcatcaggaaattgtggtggcataaagggatactctggatgtcttcatcatagcaggtaaatgtgtccagaaatgctgaatgttctttctctttggaactgactggccagaactagttgtgtggcttcttctggttaataaggggtgaattgatacatctatttttttttcactcacaggaaaccagaacatttggcaaatagccctaatggcacctacatctactgtgtgggctctactgatagcttgtgtctgttctgcatttcaaagtgctgttcttcaacctctgccttgtcattgtgacatataattattttctctattcttttgaaattttactatctcaggagaaatttttaaaaatttttttctttaaaatggcacacgagaagaaactttgttttgataaaatggaccaaatggcttcattttagtttagtctgaatgataaggaagaccatgatgtctggtttcatctttccttcttggcttgggaagatgtagaggaggatggaacatacaaggatatatggaaggaacagctgtctgaaattttcctgtctaaggcaagatttgattggaggtaaccactctggacctgctatcatattaggaccaatcataaccttttgccagagcaggagataacaggtttaacatatctattgcttagtagagaaaaatcaactaaaaaaaaaacccagaaagtaaattgattgtatacttggtttatttttccttccttggaaactatccaacacatgcatgcttacaaatgtgaatggctttagggatttgaagaaggggctgaagtgtctgcatctagattagtgtagcaaaaactgttaattatttcctactatttgctttactgacaaactttaacttcatcaccccccctccccgcctcatcttacccaggattttctagaaaccaaagatttcctatcctggctgatgcaggtccttccttagaaaacactttttcgatatagatatttgatggacagtgattattatcagctctcttgaaagtttctgtgatgcatgtctagaattatggactgtaagcagaaggatagcattactcaacccatgtgttcttatactctctgtcaggaggcttggtagaggcgtagttctaagtacaagatgctttgttctaatgctagaacataagggggcagatgtgtaggagagaaaatcccaagctgtatcagatgaaagactgggaaacaaatgtgtgtgtccctgggatggatagggtctgttgtcttgttatcattgcccatgaaagtggagctgtgggcatgcttgctccatctccataatacctgctcctacccagcatgcttcttcctgtgtcacacaatctcagaatgtcagatctctatgttggacctgacttgtattattatatgaggtaaaagttatagtgcagcttagtggttatttgatgcatcatggtaatgtccatactattgttcttaggacaagctgtgttgacttaatatcttagtacatttttctcatgactaactggtgtgttccaggcttgttaagctattctgaagactgtgagagtaataatttgattaacttatttttctcatttctctttacattccacttcctaaaagccttattgaccacatagtaatctagatgacaaccaagaataaccaccactccaggcttagctttaatttcaacaacatgtattaatagatttttatcctcccctatattgaagaaaatgggcacgcctttgcagatggtcatatttagggctttacttttttgtgtatttactctcctaaagtcatcaagcaacagtagacacataggtcttcggattgcagacttgttcgtccaaaccaatagctatccttgtacagtgagcctattttatccacccaggaaagttgttttgctttgtaaaaaatggaattctgtatgaccaacattctcaaatgcaaggagaggactcccagagcttaaaagccttgtgtgttataagaactttagagatatatttaggtatgaaaataagcccaactggtcttttttaaagccctattttcttcatttggttccacttcatagttgaatataagcctagtgtaaaggtttgcactttccaaaaatgtgattctggcacaatctcaagacaaacagacctattctaaggagcttgtacccttcctatagggtggtggattttgaacaatgtagtgataaagcaaaccacagctaaaagaaagtggtagcaactaatttaattggatgttcactaggaggaggctgagatttttatttgccccccctccagccctcatttattagatagttcatctagcatcttgcagttaagtagatatcatcaggttcacttcctaatgagtgaaaaagacctatttcaggcatggcttccctgtcccatcacacctagaaacctagcattccttgcatcctttttttttttttttttttttttttgtaaaatgatagaaaattcaacttgtctcctttttctttcccctgaagatcaagctggattctgttgacagctgcttggataaagccaactgacagggagaactgaatgcttggttgttttggcaacttgcaaactaaaagcatattattggagcgagtattgctctgcattttggcaagctgcaagaagaattagtgataagtggtccatctaaatgatttagtgaaagccataacaccaggcttacaaatgtcttttatctaagaagaaagctggtgagaggattaaaatcttaaaatgccttcttaaagaattttgtcttattctgttataatattttaactttttgacccaaacaagttcttgcaaagtgtttcagcatacatttataggagcattgtattacgaaggccagaattcttctcaaagaattcccataacaatactgttatgttctgtgatttaaaaacaattttggagctggcattaaaatctagtgaccccaagaagacgttactgattaatttataagtatggttagtgaagatagcagaaaacataaggttttactctttttctgtttattactatcagaaagctacagctcccatttgttaagaggccacagttgctgaaattaagtacaatgcaaataaaacttggtcatgatgtggtgccttcactgaagatttacttgaattttgctcacctgtgtaaaatctgcttcaaatgctgaaataatgatggaagtaactcatttgaattgctaggattgcatgttcccagtggcagctctgaacaactctaaaagtcatcacacatcatctttgcttactgaattggaaaagtagagtaatgggctagggaattccacaggaatgagttgtattataatgatcaatgcaaagaatgaatcctgtcagattattgtagcttcttgctatgatccagtagaaaaccctatgacttaaaaaggataaaagtagaatgaagttaagaatttactaaaaattcagcaaaattcttggttttatttcatacaacttgcatacaatttatcattagtgagtcttggcaagacatatctgtaagtgatataaagacttcattgaatcattaagctttaacttatttgtacactaagctttgtgtattataagctttagactcaaacacttgcaatatctagccatagatctaagtaactgaacaagaaggtatggatgacaggtgatggcagttacattgagggacaagaaaatctttggggccatacaactccagtggttgccagatgaaaatgtttgggtgaatatatttgacaattttcaatggaaattggaattgtgaggtttcatgcaaattttattttcaaatgttgacaatcatacaagcaatttaaaccactgtgggaatattaagttttcaaaactgaatttaactttagggccacaagcttaaaatcttggaactaggttattataatgaaaaatttaccagtattttataacaattctctttaagtgaaatgaatgtttcttcatgatcatgttagtccaggtatagtttggagttatattttagaaccagtgaatttgatgtgcttatttgtaattctcataggtactatattttggaatagtaaagtgccctataaattccttgataaccttgacttaagtgggagtagtaaatgacttagagtttgccataataaatgtgaaactctagattaaatgagcaagttaatgtcccaattacagaagtagaattgcttgctttggaatcaaaactgaaatgcatacttacagcataaacacaaaataactgatgtacgtaaaaaatggtggccagaaatattcctggaatcaacatggcttgggagttaaatgtcatcattcttaaatgacgtgactcatggaaaattagcttataggaagagtttagaaaatatcttttattttttatcatataggctagaagcattagaagtttataaaatggttatttcctgtaaatgatccatctgatgtagccaagatgtttgccttataatctctgtaaggtacaatactatttcaagaaggtagaaaaataaaaaggtactacagattttctttttagagaaagaagtaaatatggactcatcaaagtactctggagtcagtatgtgtatcttaaaatggctctgccattttcagctcatctgttaaactggggtgatgagaggatgccccatagcacatggaaaacactgtgcaacacagtaacatcactgttaatattataagcaggaaaatctaggaaagtacaaaagaaaaacaatgattgttcctgtgtagtatgtacctgagtcttatttgaatcattttctatgttgatatcctaatttttcaaaagttggtgagatacatgtgattatcttctactaaattcagattgaaatgtagtgaagagtacagtagaaacttgtttaatcaacttccattttgctgtcttttgagattgagtgatagtctccacttaatctctagggtgtgtacagttgttctagtttattctgtggataccacagctcccaacaactagattgtaggcttaccatcagtgacctctgaatacttaaaagtttgaaccaggcctaacccttctgttggtgggccttggacaagattgcaaacacaagtccagatactttgcatataaaaagttgaaggtaaaattaaccatttaaacagatatttatgaaaagaatgtgtcttgtcctccttattggatacagaaatcaaggcagtaattaggaaagtcctgttctaatttctatttctgaaaatatttggtgttctaggcagtttgtattaacagagaaatatttcattcccacaagcatgcagcccttgatctgaagccctgctctgttttccagcctccaatacatcagatgcagtaagaggtttcatgagatatgtgaatacccttaatccatgtttccaagccttacttatattggtggctattttgtcatggagtttcaggttccttgtattaggaacatgggtaaaaaggagcagtggatctagaccggtatgttgaatggcagaactgcacccaaatttggtctcttaaagcatatacctaaacagaggctcctgttctcatgtctagtagcatcagtgattgctattaagttgaatatcacataaaattatatattattagcatgcaaaggcacagtaattattcctatgaaaattatattgggaacttgggaggttctttataaatagctataacattgctatattaaatgtaggcaaaatatattaaaactttgggatagataacatatagaaatgtcccactcccagcttgattgctaaatgttaagttctttatcaagttcagaaattgaaaaccctagatagtctattatggataagaattctacaagaaaatccatgacaactctaattggtatgctctattaaatacagaatggagaccaaatttgcatatttaaaataaattgggagaaaacaattaagatacagtttaaatatatttccaactttgataaaaacttgatttggctgactagcctctcactttcaatcacaccaacttaaggagattttcttctaggtggccatagtcgaggagctagtggactggtttgatagggtgtgtctatcttactggaaaggatattctgatgaccattatgctctcttttcactctgaaagaagtaataatccactccctggggaagcactcagaaaacctttttgggattagttgaactttggctgtaccaggaccttgtattatctgttgattagttttcaggagtggtcatgaaaaccttgatagataagtgttcctatcaagattttatcatgtgtgggcttcaagatccttcaatagtgtaataatctgtgactcactgattaggccctaaagttccactcaaagaaagtatccaacattcttccttcagtcactttaaaccatacaaatattttatgactttctttagtaattgcattttttctgcacagtatctctaggaaggctaatgaaaaaatgggcacagccaagtgagaaacctaagagagccttccttacttgaaataactttagaaaaagaaaatggtcatacatatattgaaatatcacactgtaaccataagtataattattatgtatttttttcaaaaatattaaaattgaaatcataaaattcaaaaccaagacacatctaaaatttaaaatattccatacagaagaaataatgctaagttctggaaaaaagaatcttgtggacccatgaaagtttctgatggtgaagtggtagttctgtaaactcctaaaagcctccagggcagactgaacaaacagaatgcctggccattctatcttcaattcagtggtcattggagatgtacaagagctataggcacattgctgtaaggggaaaagataaaggagtctttcaactgctggcgttcagtaactatatagaggcttgctatgcaatcatgaggacccaacttccatgcccagaactcatgcaatacctcatgcttggaattatgacttgggaaggctgaaacaagtggatccctgaagcctgatggccagccatccagcaccattggtgagcactaggccaattagagactagttcaaaaaacaaggtggaggcccaaggaatggtgtgaggttgaattcactcttgtgagagctctcacacttccctttacctttattgtgctcccagaactgcagtgtgcacatgaattcttattaaatttcacattctgattctgtaagtgtcacacgggtcatagattaaaggtatttcctggagatgccaatgattcttaatgtgcatgcaacattctgagtaccaaagaccaagccaatagctcttacaaacagaatgttctcactatgattgtgaaaataattagttggaaaagtagatgttggaaacagcctttgttaatgagttggtgaaggcagattcaacaatgaagaggaaagttggacaatggacacaaactcctactcatctccagctcgaacacagttgccaaagtaaagtaacaagatccataatggagaaaaagggtttcctatagatttcttgcctagtgtgagagggaaaggaaatcataaagcacagtaaacattttacacctctgactgttacacatgaatctcatgctgacattcttaatgctcaatggattctatctatctactcccctgactgaccctaccaaagcttacaatgaaatggtagccttaacataaaccagagtaagatatcaccagattatttcagccatgaagaataaggatagtttcattatatacatggagcaaaaagacattgaagtctatggccgttctagactatctaggaagagttttgcagccaaagaagatcccagatggcttttttgtctagaacactactatgaaggttgagcagtcagaattggtggaggatatttggtcatgtacaaacattaggatgctgggtgttctccacctcctcttttttcttcatcaggtcatttatcatgtcactggactagatctttcttaggaatcaggcattaccacccctactgataccaaattgtgggaccacatgagcaactatgagaagatgtgttggggaacatggtagggaaaccagggcaggcaagtgttatattcctgtttctttgtctatttaaacaggatcttcctctgtgggtaagctatcttcaaacttttgatcctcctgtctcagcctctcaagtgctgggattacaggtctgactttctatgcccaatgtgggatctatttctactgataatatgtgaaaaagacacatgaaaggagacttgggtaacaaactcagcaatcagaaaaagcagaactacagaaaccaaaattaagtacaatcacacttacattaataggatgagtgctaacatgagctcattttcacattctggtgatattccacacagattgccaaaatttctgaactctggtaaaataaaggaacaatcagaaacccaataaggagcacacacctttcccctacttaaaattagatacatattgccttccccctctaatctctttattctaatgtggggtaaattgtcctttcctattaggagtactttgagccccagtgagatggtattgtgttgggtgctttcagccatgcgaatgctctgttgcagttgctcttttcatcatttttggtcataaactgtgaacactatcacgctcccataaacaatctggcaagctatgacagatgcaatgaagagcaacttcaaatgatttctgatagtactgttaatgatggcatggagaaaaccattccccagagaggcaattgcaattttcattggttcttgttaatatatgtgtggttttgttgttgttgttgttcagcaattgaataactatagtgagacagaataaattaaggaatggtttctaaaataggattccagtttctgaaaacttctgttctctaagcctttagagttatttttactgtctccaacattctctgggactatcacagtgagtgtggtcttggtcttcacatctgtgctcacttttattaatttctgttgtgttgagtgggcttttcccttggtttgttaatcctgattctctcttacaattcttttgccctgagattgcttcattctgaccatcactgggaacatgcctatcttgtgtgctgggtcaaaaaatagataatagatgtgatttctttgatgtctaattattgggggctatccactttaaattctaaccctaaagtcttcagctagaaatgtagctcaagggaaaggggtagtaaatttctaaaaaagatctcagaaggttgattttttagaatccctgaagatggggttaggggggaccttttaaataaaccaagtgcccacaatggctttattaccactctgctccttcacactgtagattacatgaaggcctggagactaatttcagcaacagccacaatttactagctatagtgggcctcagatgaatagtttcttgtaaaatcagtggcagctttatcctagcagagcacaaataaatcagctcttattattccacattcatttaatcctgagacattagtcagtgatacctttctgcagcctaataaacagcagcagcagcagtttttctttatgagagtagttgttcatcctaaattagagccagcattaggcagaggcaggaacttttgccagatgatttaaggatatataatacgagaccataatagtgcatgaaaactgtacccaagtgaataaagatagaagggtcataattttactgtatgtgggttacttcagaacacatggcttattttatcttccttgagagttccctttgttgtagttgatggtgttgtcttcctatcatgactcaagcttaccctttctccactggggagtgaggaaaggactgaagttgcgtgtttgcccagaaggaagtgggcctgttacaagagagtgtgaagtgaaatatatccaaagagtgctctgtttatttcactctgctcagctccaagtctcatcccaaaccaaaacacaactttttaattggattcaacccaagtagaagctttcttttgcaacctcagtgcacatatgatgcacacaatttgactcaatttatttgaggatgtttattgatagatttcaaaacaaaccttcaacacatgtaaattggcttccacggcatggatgttctgggtttctaaatagggatggccatgtttcattcatctatagatttcgtgtgtccttagcaaactgtaggaaagttctattcatgatgtcctctcaaactgctgttcatgaaaaatgtatcagaacagtttgataaaaagcacacatgaagccatttgtgcaacataaacaaatagaaattgtgcatataaacttattcactatgtagtatgcacacagctgtactctgttgataaggtttgtgttgtagtacagtgtacttcagagttctcaagtacctgtcgagtggataccacagtagagtaattcatgtaagtcagtgtatcagatggcatcttttgtggtggaagagaagaggccattggattgcaggaatagaagcactggagatgatgtaaaattggtgggatcttttttggcaataaatagatgtaagatgcagttatcataactacgagtcatcacatttgaccagggaattcaagcttcttcaaataagttgtatcatttggacaatacaatgaagaataaaggtacaaactttaatgttgcatattatcagtaattatggagtgccataattaacttagttttctgtagttaaattggtaactttagtctgccagtatattacatatacagtcagattctgtttacaaacaagatatatcaaacagatgattcctgctactcagaaaaaaattacttttattttaagaaaacaccagagaatttacacaaaatcagtacagaaatccaaacacacttagttcatctgtgaaggatgtatgagttcaagatataatcacagctagagcaatggcactgtgtgtcagtgcattgtacttatatgaggataccaggatgttgttaaacaaatggtctttatgtccttcaaatttccttcagaactgacctgccactaattataaatacatatataaatgatgtgcttactaaaaatattgataaaatcttttcaaagaaccaattcttcattttattgatcctttacatttggagagattacaacagacactggggaactttacaggaatataaggacatattttaaaaatctatatttcacttagctggaaaatctaaacaaaaatacatgaatacatgtatcaacattaaatgaaagatgaaataattaatgtgaatagaccaattaaaactaatgagataaaagcagtaattaaaatctctcatctaaaaaaacactcagggccaaatgaattcagtgcaggattcaatgaggccttcaaagaagaaataactccaatactcctcaaatcattctttataatagaaaaggaaaaacagttccaaattctttttacaaagctagtatttccctgataccaaaacaagacaaagtcctcaaaaataaagtaaactataggcccatctcttaagataaaatagatgcaaaaattctcaataaaatatttgcagtcctaatttaagatcaccttaaaagatgacccactatgataaaatcagcatcactctagaggtatagaatattattcaacacatgtaaattagttcactatataaatagactcaaggtcagaaacccccaaataattatctagttagatatagaagaaaacctatggaaaagtccaaaatgtctttataacagtcctggagaacccatggatacaggggacatatcttagcacaatgaaggtgatattcagcgagcccatagccaaagcatgccaaatggtgaaaaactcaaagcattctaaaaccagaaaaaaagataaggatattcactctctctatttctattcagtatgttgcttgaagtattagagcaataagagaagtgaaggaaatcggagaatacataaaggaaaggaaggagtcaaattattcttatttgtaagtgatatgatttcatatatgagaccctaaagaccccagtaggaaattcccacagtctacaaatatattcagaaaggtgtcaatatacaaaattaacacacaaaagtaagtagtgttgctatataccaacaacaagcatactgagaagcaaaataagaagatatagacctcatgctcacccattagaatgatctatattgtgacagtggttatcccacaaaaatcattctacaaattcagttcagtgcaaccacaataaaatttccagaatcattcctcccagacatagagaattaaccttaaaattggtatggaaacacaaaagtacactcaaaacaatcataaacaaaaggaatgttgtgggagggatcactatttctgatttcatattatattgcagactcatagcaataaagacaagcattgtactggcactgaaaaaaatgtagctcaatggaatagaacagaggacctagatataaatccacatatccgcagccacctgagttttgacaaaggtgtcaacagtacacattggagaaaagtcactatttacaacaaatggtgttcatttggatagttgcaagtaacataaagaaactagatccacatctttcaccttacataaaactctgaaatggggctgttgatggttattgacttagttaggttttgattgcttcgacaaaatatcataaccaaaaatcaagttgggggggagggtttattaggtttacacttcagcattgatcatcactaaaggaagtcaggacaggaactcaaacagggtaggatcctggagtcaggagctgatacagaggcatggagggaagctgcttactggcttgcttcctttggtttgatccacccaccttcctatagaacccagaaccagcagctcaggagggctgggccctcctccattgataactaaattagataatgccttacagctggatcttatggaggccagctgaggctccttcctctgatggcactagcttgtgtcaagttgacacgtaaaactacacaatacagttatctagcaaattattgagtttgttttctgacctaaaataattgagatagaagtccaagatgtagttttttgtttgtttgttttttgttgttgttgttgttttctctttggggggctgccataaagctcccaaataaatacatggagactgattcttatttatgaatgcccagccttagcttggctggtttctagccagcttttctaatttaaattatcccatttctctttaattatggttagcctctgggcttttacctttctttattctgtgtatcttcctttccttcttactccatggctggctgtgtaggtggttggtgtcttcctccccttctcatttttcttgctcctcactctaacttagatttcttctcctatttattctctctgtccaccaccaactctgcctatcctttctcctgcctacctgttgaccattctaatctttattagaccattcagagattagggcaggcaaattaacacagctttacagagttaaacaaatgcaacataaaagaatacaatacatcagttgttggatgaaggttctatgatgataattcaggtagtctagatatagggttgaaaggccttggtcctgtctcaaagtgatgtgccagacttttttgacttcccatgggaagccttaccctctctgaggactaaatgggggtggagcgaaggaggagagagcaggaggagggagggagtggcaactgggctgggtatgtaaaaggaaaaaagattattttaaataaaacatgacaaaaatacaacacatatttgcatcattaaacaaatattccacagcataaacaaatgttacacatcttaaactaatattccacaaaactaagctgtggagaaaataatagtaacaattttatacattccagattggagaagcctaagggtgtaagtccattaaacagatgctggcttggatattttgtaagcctctggatctttccctttcccttattggtcctgtttagacacctacaccccatgtcaccccaccttttctcctcataattgatgaatttggacttcatgaaaaatgaaaaagcttttatatagcaaagtacatcatcattgagtcaagagacagcctacaaaatgataagtacatctaacagagggttagagtgtagactataaaagatctaaaaaactaaacatcatgataacaaaatgttctggttagttttatgttaacttgacacaacctatagtcatctgatgggaagaatccttaaatgagaaaatgcctctaataagatcatctgtaggcgagtctgtagtgcattttcactattagagattgatcggggaaggcccagcccattgtgggtggtaccattctgggatgatggtcctgggttctataagaaagcaggttgaacaagccatgggggagcaatcctacaagtagcattcttctgtggcctctgcatcagctcctgcctccaggttcctgttctatttgaattcctaccttggttttcctcagtggacttggactcaggatatgcaaacccctaaacccttccttcccaggttgcttttgtcatgatgtttctttcatcacagcaatagtaaccctaagacacaatccaagtaaaaatttgtgcatggaactaaacagagttgtcaaaagaagaaagccaaatggctagagaacatttaaatttgtttcaacatccttgatctatagggaagtgcaaattaaaactacttttatgtttcatctcactccaatcagaatggctaacttaaaaatcaaaacaaattaagtggtagcaattgctggtatggaacacttactgttgttgagaatacaaactggtgtaaacactatggaaatcagtgtgggaattcctcaaaaagctagaaataggtgaaatatatgatcaagctctatcattgttgggtatatgcccaaagactctacagcatacgctatgtatattttatccattctctacccacaatagccaggaaatgaaaacagtttatatgttcatcaactgatgaatagatagtaaggtatatttctacactgaaatattttttagctgttaagacaatgaaattattggatttcaggtgattagaacaggaaatagtcattcagagtgaggtcatccagtttcaaaaagacaaatgttgcatgtctcatctcatacatggacactaactttaaatctttagatatgtgtgttccaacaagagctcctataaaggtcaggaaattagtaacaggccatagtgcatggctttcaagggagggaaggatttgaatccaggcggtataaaggcagcatggttacatgactggaacttggcaaaattgcttatactctgctctcatttccatgtggtttgtcccacaaaggtccaggttttgaaagtttagcttcatgtgaggtgatactgaagcgctaggactcttgaggtagggctagtgcaagtgtattggatcaaagggcactgccttcatgttggatgtatattgtctctagggagtaggtcaggtctcacagaatatgtaagttctttagagagtgggctttgggaagtgagtttagcccacttgcttggctcttctgaatgcagcagtcagtctctctttcttagtcatgtttcagtgcagccaggaggctcacattaggatgctgtgttatgatgtttacactttccagtcaccagcataccaaatcaaataagcctctgaataaagtacccagtcccaagttttctacaatggcaacatgaaatgtgctaagacacattgtcagacagaaatggcgtttttcacttttatgggtgttttcatgaatactttgggaaacattatgagttgctggggtgtgtgattaatgttttcttgttctttatatgttctttcgggtttctttgttcttcaaaatacaacttaaaaatttggggggccacgcatggtggcacatgccattaatttcagcacttaagaggcagaggcaggtggatctctgaattcaaggctattatggtctacagagttagttcctgaaccacccaggctacacagacaaaccctgtttcaaaaacaaaagaaaaacaacacacatacatacacacacacaaaacaaaaccagaaaattgtgattttgcacttcttaaggaaccctgtacacagatgtttgtgccgaatttgagaaaatcctgcactgctatagtctgctcttgatttatcttgtccatgaagaattttgcatttattctgactcttttagtatctgaaaattaagccaacctctaacttaaaattcactcattgagtgtactcattaccatacaaatcaaactctctgtatgatactaacactgtttattatcctgggtgagaggtaaaagaagcattccataggcccacctttaagtgtgcaagtccgtcataccatttgttaaagatgagagaaaatttataagctagtgaaatgctgtgcttgtttatttttacatgaataattaaattcttaacattttcagagttcatttatgttatgattttataatcattaattctgagaatcctgctttgcagaaatacatggtacaaaacaacagaagtatatgtagggccattttagaaattctgttgtcactaaatgccaacatggatttaacgatttttgtgaaactaaagtaaaaaattcaaaagtaattttataaatcaaacattctaacaaaatacaattcagagacattctagtttgatatatatgtgccaaagaaatattaaagtcttgattttccataaagaaaccattatgtttccataacataaaacatattatgtgtcatacaacctctgaaaatcaccaggtcagtagtttcaaactttaggcaagctgctttggtcagtgtcttggaattgcatggtgagatgtcatgaacggagcagagggtccttggtatactggacaggctgcagtgacttgcatgatcaacatggctgagagtatcagcaacactctgggtttatcatacatatgatcttgaactctgttttggctgttgaatatttagaaacctcttaaacttacaacattcatacaacatttaattatctgagcccatatggcagctgtgacctccaggttatgaagctgtgttttctgaccctgttggcacaggcacaggtaagcaggcccagaagttatgaaagcaggagagctgacccctctggctcctcacttgttgatgatgtggtagcattggggagggaaagatgcctccctatacctcctgtggcagatgagagagctgacctcagaggcacaagagtgggagagcaggccctgcacctcacctgggcaaaacagtagtgttagccccagtggtcttggttgaactggctacaaaggcatgagaacagcagaactggtctcattttttgctgtctgttgcagtggtaaactagtcagagcaatgctggagagctttttgttttctctctctctcttcttcttttgtatgtttggttttgtttttagtttagatttttggctttctgttttattttatttggtggggggaggtggcaagggcagcaggcagatatgaagagacagggagatgaatgggattaagatgcatgatgtgaaatccacaaagaaatgagaaaaaagtcttaaaaagaataataatttaaaaaaaaagaagctgtgttttatactgactgatggattgggcaggttcatatctgttagttgcaaaattcttgattccataagactgatttaatttgaagcgattttcttctgagtcacaaaaccaaacagaggcagagatggaactcagcttcaataagtcaagctttcacttttgctaaagtgaagattggaaagaaatcttctaatatttatctcaggatcttagatttccataagaaccagacaaaatgcatcagccactgggcatttccattgcaccaggaggacctgtgctcattagcatctcccacggtacggagacttagtgatagtggcaggtatggaagtaataccagaaatggaaatgagtaatttcatgagatttctctaaaagatcacagatttcttctgagaggcttctagaaaggctatccggagaacagaagacagagtagaaaataaaatttgtaaaatgtttgatgagaagtgtttgtatctgcactttaactgcacattcctaatagtaaagagtaaaagatgcccttgatctgtctcattgcaacacaaatgatgtagcacagatcaagggcattaaatgacactaatgctatgttctggttatctatgtagtataataaactgtcttaaaatctagtggacttagatgacatccagcttattctgtttaggtattccgtttagcttattctgttaggtacttgaaaaggcaagaggcaggtggcttatctctgtttcccgatattttggtcttcagttgtcatgacaaggatggctgaaggtgacccaaaacagatggcttcttcactttcttgcaatgtgtctgggttgtgatggcctgagaatggactcatgatcttgatatggcctctcaagaatgatggctggaaagcagtcagtttgttttatgcagtgccttgggacttattgaacaagagagcaattccgagattcatggactttgatgctctgtcttcccagacttaaggtcaaggggtgggcaccacacatactgatgtagaggctaaagaatttgaggccatgttctaaaacaatacaccctggaaaatctcctgactttgatatctttattgtcattgtattgaagtttgccttaatcttacaagactattactgtggatttttaaaacacttttaattttgattctgttctttatttgcatcagacataatttcctgtctgccagaacaactctctaatttgtgtctccctttctctccatcagtcctgcctggaatatcagtctcactgacatttcttatgtatcaactttgtttagtgaattttctcgattgtcttactgccttattgcattggttctagtgctaccttattatttcattttctctgcttgttcttgaattgttttctgttgacgatactgaagaaggagaatagattatgatcagaaacgtttctgtttggtaacacatgtacttatttactctctatttctttccagaattactaattctttccagtgtcttactaattttgctgtgtgttgtaattttcaatgagttcaatgtatttttcaaatagtctttgtgactttattttcaacctaaaattattttaaagtgtgtagtttgttaagtgtttggagaattttttgctgtatttttgttatggctttctgttttatttatttttatgaccacagaatacacttttgaatggtttcagttcttgcatatttgtttacttttgcagtacatagtgtgtcctgtggagctgtagagtctatagtcactcaaaaagaatgcttcttttgttgttttaggatacagagttctataactgtccattaaacactactaccttcttgatggtataaagttcctcaatgtcaagaacatttctaaatttttctctcaaatcatactttcttctattcatagttaatttgactcatgctaatttttgaaaaacttctaaaacaactcttgctcatgtatcagtgttttttatatgcataataagacttgtttgggatgttgttaggagtcttctggtgtatcacattcaaattgttcctgatggagatgacatttgattaacagcattgaagagtggaggcattaacccagttgaacatcattcattcaaagcatttgtaatatatatattatattacaaggatcccaacaatccataatggtatttctgacacattcaaggcctaagctaagtgacgatgtatgtattgcataaatacttgcactatgatatgtggtaactaagaacttgcaagaaggaagctagtgctgaggaggtaatgatgtaaactgaacaggaataaagaaagtgtagggttaatctatgtagagatgatgggaatttaaatctaacagtgtataatgctccatattctgtactttaaattatttgtatggcttttattaattttttatttaaatcacaacaattttattttacataccaatcccagttccctgtctctcccatcctcccactctccttacaatctccccatcccacccccatccaccccttagagaggatggggcctccaatgggggatagtcacatcatttggtacaggactgaggctctcccaccctctatctaggctgagaaagtatccctccatagggaatggactccaaaaagctgtaagtgggtaatagacatagagcaaaagataaccagcctacaattaatgatcccagagacactaggaaataagagggaccctaagagagacatacacagacctccaagaaggagaaagggataagatctcctgagtaaattgagagcatgggagaaggggaggggagagggaggttggagagagaggagaggagaagaaggggaggagaacatgaaggatcaggaaggttgagtttgggaaggggaagaggaggagagcaaggaaagagataccttgatagaggagctgttatgggcatattgaggacactgacattagggaaattcccaggaatccacaaggatgaccccaactaaaaatctaagcaatagtggagaggctaccttaaatgtccttcccctataatgagattgatgactaccttaaatgctatcaaacagccttcatccagtagctgatggaagcagaagcagagattcacagctaagcaatgagctgaactcctggaatccagttgtagagagggaggagtgatgagcaaagggctcaagaccatgttggggaaaccaatataaacagctgacctgagcaagtgggagctcaaggactccagactgacagctggggaacctgaataaaactgaactaggccctctgaacatgagtgtcagttggggggcttgggcagtctatggggctgctggcagtggaacaaatatttatgcctagtgaatgaactggctatttgtatgttttaaagtgatttcttgagtggtgggttgaatatgtggtatttttcccaatagtgttcaccttcttcacatctttcaatacccataattgataaaaatggtacattaaatttatcacatacaaacagctggcctgctgtatggttaattatatgacctcctcctcaaggttatttcttgctgtcaggggctgatagaacatagagagattttaatataatagcaacgtagtaacaattgtcttatttgtttgtgggacttatggtaaacaaaatgttataccagaacacatcagacgtattatacataaataactattgaagaatttttgatgtcatttgtttaaaattcttgtgcacttccctctgggctgaaattaaccatcaggtctgctcaacttaaagattgagttgctgaatcccaagacaaagatcctacctctatctctgatttcatatgtcagatatggagtcctataatttaattaaggcttattcacataaaaactttgcatggctaatatgttgactttcccttttcttttaatatattttatggtagataagctttgcttaatggctcaaaatgaatatacatataatgttattagtactacatgaattgatcacaataaatagcttattgaagacagctctagcttgaaactattgtcatgccataattattattctatcctactcattatacaaatctctagtgtatagaacaaattatattgtcactgggtcactgtacttgtgtgttgtggtgtgtggggtgtggagtctgtgtgtgtgtgacagttttgcatatgtctatgtggattatttgtatggtgtgtatatgtgtatgggctgtgtatggttcctgtgtgggggtgatgtatatgtctgtgcatgagtatatgtgtgtatggagttttgtgtgtgtgtgtgtgtgtgtgtgtgtgtgtgtgtgtgtgtgtggtatatgatttatgtatgtgtacatgtgcataggatatatgtggtgtttgtgaattgtgatacacacacacacacatatgtggatggagtatgtatgtgtgtagtagtatgtgtatggaatgtctgtatggtgttttgtatatgtgtatgtagaggggttgtgtgtgtgcatatgcattgttgttttgtttgactaccacagatcatgtactaaaataactggcatctggataatgaaatttatcaagagctttagatctctgtaacattgaagcttaccatgcaaaatgttacccactctgatcacttgaaaggcatgcataaatgagaaatcagagtttttgaaaactcatttaaatgggagatttccaagaacccatttctttctcgtactgacaaaataaaatggaagacaagacaacatcaggattcttacaaaaccagggtggttttcttttttcagtatcaaggactgaacccagggccttccatatcctaggcaagtactgttctatactgctgtatccccagccttacaacaatattcttaatttcgtctgtgtatgtaaggatcagggaccctataagcagtgtagagaatccaggaagcattgttttagaacatagtagtgaaagtgcataataaacacacagtatttcgaaagaaatgagtaatgttggaagacagtattaaaaacatgcagcacagcaatgtgtccactttcacaaatccactgagtaataaatgcatcagcactaataaatgcatcaggactaataatagctatactttcaatgagacgaactgaaatgctgttttgagttctctggaatgaatgtgatgtgatgtgacaatatttgccatttctgttggtgacagagtcctaagtcctgctgaagctagagtgcttattagtctatatttgcaatagaatgaaatgctgaattacagctagcgggtagcaaaaacaatgaggaaatatttttacacccaagtttttaggtcttctgaaagtttatcaaaaattgtatgatgggggctggagagatggcttgctcagtggttaagagcgtgaactgctcttgcagaggacccaaattcagttcctagtacctacattaggtgtctcagaactgcctataacctcagctctcaggacctgacacagtattctgactttcatggacacctgaactcatgtgcacacagacactcataagtgcacataattaaacataaaataaatcttttaaaaattgtgcaatgcccccttcttgtgagaaaaaggagcatagattacagatcctaggttaagcatccttgctggaaaatgtttccatggcaggctgcggacagagctctttgacagagttattgctttgtctggccatttaatggatcagtagttcataactggtttgtaactacttatgcatctttctcaggtacattgggagaatgtatattgggagaatgccagtgcccagcactgggactaaagtccaacagaacagactgtagcaagggtgactgtccataataggaaaaccagagccacactccatgtcaaatgctgggttaagatagtgagtctaggaatctgggagcatgcacttatgggttggaaagtgaagcctaactagatacctagtatcagtgggtgtggctagaagtttacagggctcatcttgattggctcctgaagacagattcactgtggatagaaacatttcttatcactttctatagcctaaatcattgtgaggcagaccatagactttccttttttctcggaatgcagtctatactggaacagatgtgacactgagaatcagaaagtcattaacccacctggctgccatcctgctgtctcttactcctctgccttcttctcagacttgctcataaagtcagtcttctctgagattggggagtctggctagggtctgtgctctacagctgcgtgcccttcagctctccccaccccctccggtacactgaagttgaggcccttgctgttccaggccaggctgaattaccaagcaagaaagaaagagttgccggtacacaatgatgacttttctctttcacagacatttgtaagctgtcttctgattgcttgttcctcaatcacatgcatttaaaaaagagaaaaaggaaaaaaagagaacaaaaattgttagcacagtttccccactttaaatgattatttttgtaatgtttttgaaattataacataattatatcatttccctcttccttttccttcctccaagccttcctatgtacccccttgcagtcttctcaaatccatggcctcttttcctgtaattgtggttggacatacatacatacatacatacatacatacatacatgcacacacctattgctaaatacaatactattgtacccacacacatattttcctaaatacaataatattgcctaatcagtctttataaatgctacctgtatgtatatgatctcagaaatcaccttgcctgttctgtgatcttaggggactttgctttgactagctggggcaagaaagggctgtagcaatctgggcaatgagtttagatgtatcagggcagaagggacaaggaactatatactcctgacacttgagggagcatcctgtacctccctcggcttcctcgggcttgggtatattatctgagggcagaaggagtcttggtctcaaaggctttccaaagaaaacggatcgggttaaaagcagttgctagttgcctatagatctcagctcatcattgttgatttttgactaaaaccatctctccagccaagcaggtaggcagaggtgaacttatcagatgcgatttttatcagagcccaccatgaggcagccgcagtcaccgcgggaccccggtgcctatgattgactctgacacactggccgagagggctcttattccgagggagatcttctcttctcagatggtattgagtccggactgattttgatagccagtttcagtcaagactcgtaaagttattgcacatttaaaactgccagtgtgagaatcactttctccctcttttctttcatcatttcacagtactgcaaggttacagaaaggtctaatcaattgtcaaactcttttatcaccgagaaggtggtaaggaaaaaaagaaaaaaaaaaaaaaaacctaactgccctactgcagggggttctttgactacacggcaccctttccacacacaatgctgccgtgattaatgtcctccacctcagaccttgttaaagcctgttctctcaggcagcctagcggagcacagtcagagcagggccgaggttgcataaatcaacgcgttctcacagcccccaggatatccattatagatgccagctggatggctggaagatagagaaaaatgaatattgtatcctgtggccttttgcctctaatgaccacttttcaacatttttgaaggcatgattaaattttgataactggggaagtcactctgagcaggctgaaatagagataaattgacggagggtctgacatctcagtggagagcaggcaactaattagtgtgtgaagcgcgctctgaaagagatgtaaaagggaggcaggtttaatcagaggagctgccgtggtaccggaatagtcggggataattgcggcctaggtagaaatcacaggctcgatgagcggctttttcggtcggtgtgattggcagtcgctgacctagtggccagcacccttgaacccttacaacagttacagccttgtcagagcaatttgcttgcagcgctctgtgaccagttatttgagctgccgagctgggacagccaatttgaaagggcgctctgctcccctggctggcagagctgggcggaactgcctcattacttttgatgactctgcttttgaaccccagcgcccttcctcgccccgaaaccctccatcgcccactcacacgcaggcgctccagggacagcttctccaaagatcctgatgtcagggccacagtgctttcgtttggggagctctgatccatccagggcatgtggcgatgaatggaaataagctggaagagaaaggaagggcaacaggggtagaggcctgctcctaggaaggctgactggggttccctgatctttcctgccaaaaggcagctgggcaaagctcaagagggtagcaaggtttctgctttcctccctggtacctgggaactcagaggcaccctctctcaggaccttctccttgctcccaaccttctcctgaccctcagaaattcatttcatctttgcatacacctgccgtggtagatcctgattcccgtgacaacagacttgtctgacttgaattcttatttaggaagctaaccctctccacatcccgcaaatgcgttaacaactagtgagtgacttttcttcttttattagtggtggagaataggagactagagccaaacaaccccgagcacgcagagagatggggtgggctagagccaggaactggagggttggccacgtgctcctaaagaaggcaaattaatgatccccctctccggcacctcccttctgctccttcacccgctagccttttcattccccgcttacttctcctcccaatattatcagtcatcctgggctggaataacgccccaaaccaggatacctgatgcgatttattttttgtaatgacagttggtgctttagaagaagcctttagctagcatagactatttttcaatttgttttgtttccttttaaaattttaatggtattttccctcggcatgaggatggagccggttatttctcagagcacctgcactggttcttctgtgggtcatgtctggcttagcaaacaggagtcctgtggctgccagcttgacgagcgtggatatggcctcaaatcattgctcatgtccctaagccaacttactcaactagagagctggctcagagcattaagtgtataggatgatccttctaggttataaagtttcatgttttccgagaatggctgctttgggttaaaattaagaaacgttctccagttcttgggcctaagggtttctgggcagctggaagtcaggggcaccggtgctcacatccaaacagcacctggctcctgttggcacacctcctacaaaggtgtccctaccactttcttacatagcatgcattggttaatgtcctttgtaaatatattttttatttaaatatttttccattttacatacaacccgcattgaccctccccttctccttccacccaccttcccccatcccagcccccaaccactcctcagagagacaaggcctcccttggcaagtcaacaaagtgtaatgcaccaagttgatggagggccaagctcctcctccctgtatcaaggctgagcaaggtatcctataataaggattggactccaaaaagccagttcatgcacccagaataagtcctggtcccactgccaggagaagctgcatgggaacaaattaggccattttaaaaatattttttaaatttattttttattttttaattttattttacaaagcaaccacagttctccctcccacatctcctcctgtcaccccttacctcctcctacccccctaggttctcgtccccatccacccccagtctactcctcctcaagggtaagggctcccatgagcagtcaacatagtctgaaatatcttaatcaggaaatgcaacctagaatgatgtggaaaagaaaagatgacattgtctagacggcaagttgtcctaactctcagtcaaataattattaggcaccataataggtaagacaataagaagccccgggaaagctttgtaaacactgcagaaggaatcagaattctgtcatgctatcatccctctgcccctaaagaattactaaaaggttaccagacaaaaggcaggatgaaaatgggattttgtgaaagggcatcctgtgctcagggaggacctagaatggctgggcacactaaagaacatcacctgaatgaaggggacaaccacattttgagaggtcttgtatgatggcatccattcattcccccaagcttacatgataggtccacaccgtggatgctttataaatgtttgtttaatgagttactggaggagtaagttaatgaaggaactagataccagcaggaagccttttaatcagaagaaaaaagaaaataaggaatgtaatataactagggtctaagtaggagaaggatggaaagcagagtaaaaaagacaaagcaaccagaggaaacaggtaaggaaagggaggaggtaggattggaattttggtatcctcaaaaataggaagaactagagagctggctcagtggttaagatcattagctgcttttgcagaggatccaggttcaattcccagcacccatttagtggcttacaactgcctgtaagtccagtttcagagaatttgatactattttctcatgtccatggacactgcacggtatacatgcacccatggtacacacgatacacagacatatataagcattatccccatccacataatataaaaacttgaaaaagaatataaagagtttttactcaaaatacagtgttgagttaaatccatgtccttacttggatgtagaggatgagttgagggagaggaacagggaatgtgtctagggtggtgtttggacacaggactgacgtagctagaggaagtcgtgaggaaaagctaaagttaattatgaggaagccctagtgagatccctcatcagacttcctaaacacccctctgtggcctgatggatctttttatcttacatgtgttcttcaatgaaattaggcaaatgtctaagtttgccttttgagatttaatacaatgactacaagtacttttctgttgggtaaaagtattgacctgtttagatcatcattaaattatgaagattctgtagataaataataattattgaaagtaatagaaaaatgagtattgtggtatcaggctgttgtcagtgaaagataattcatatggtacatttatttgtctttaaaattattcttacgggcttgataaatggctaagccattaaaacctaggttcacaaccaaaaatataaactttttgcttaccacacaataatttaaaatttttacaagtttaaatgattatttaattactctttctattattctcataaggactgtgtcatgattacatatgatctaatacatagagtgaagttaaaggggttaagttgctactttgtgtcatgtagctagtaagtagtagaactcagatttgagttaaacttcctgccctagtcctttttcccaaacctgcaaccggaattctcctgctaaatgcccgacataactttcagtcagttctagaaggaagtagcttgtcctggagggtaagcatatgccaatgctgttttcatatactgacaacaacaaattgattattttgcagatataatgagtgtgagaacctctaatgaagactttccattgatcttttgcaagggtgaagagatctattaactctttcctgatgccctgagacacaggagttagatcttgtggaatagagatgcaaatctagttcaagaactctggggactctggagaaacctagtatcagaataggaaatgctaggggcagttatctgagatccagctgaccttccattgttgaggcatgcagacttgggggtagtctttgcaccttttctttcaagtgtctttccattttcacacctgaaaaatgtggataatggttgtcttatagggtcctggcaatatttgagtttatgtacacaataagcattcaataaatagcagcatccatttttctgttaacagcatccaagaaatatacctgccatccgtctttgcactagggttctttagaggaacagaactgatagaatcaatatatactaaaagtttatttcttagattggcttacacaacacatatgagacagtccaacaatggttatctcaaaccagaggctgagagtcaggtagatactcagtctacgaagctaggcacctcataatcccagcttggtactgaaggttcagatgattcctggagagcagctggtgttcagtccttgttggaatcccaaagagcatgctctaatatcagtaaaggaacctacaatagcagtgaaagggtagacaaactcatcagcaagagtgaagataatggagcaaagcagcaaaaacctttgcttcttccatgattttttatttgggctgctaccagaagatgccactcacatttatgggtggtgtttgttctttctacaacagttaaatgaattaaaataatactctacaaatatgcccatagcttaccttgatgtagacaatcccacactgaggctcccttggtagatcattctaggttgtgtcaagatgacaattaaaattaaccatcacaagtccctatgaacgaacctcttccttctgtcaccttctactgccatgcactgttgataaaacagagataaggtatgggagggggcatggctgtttccttaaatataactctttttggagggtactcacatagaacctgtcctccttctcagtaatggtatgtctttgaagtagaaaacaacaaacaatggctggttttggaaacatttgtcaagtagcagtatagcttgactgttctggttttttgaaaacttatatgcactttgttatttgaaaattatacagtgtgcctcctagtgaaagactgtctgagttggagataacctgtcataagttttcaagacatttatgatttaatgctttcatacttaaaaatagtccattaaataagattatttggaaaccatattaaatgtgttcaacgtctctttaggaaagccttagaatattcctttcttgaaactttcagaaacttcattatcctcatccctcaacaaagactctgccgtcaaacacaggcatatacagtggtaccggttagcacagagctaacactggtatgttaacctttccacttctatgtagaatatcaagaaaaaaaaaaaggtccctctcccatcagaatactcggagatgtcatcatcacccagtaaacaacacatcactatcaatactttctttaaagcaatcttgtactcaatcaatggaattacatttgccaataatatagtgtaattataaatttgatgatattgggtcacacaatgcctgatactgtagtataacacaatgatcacagacttttttcataaaaatattttagtaaatacttatagtgatgtcatttataggtgatagataacattttctttgaaggcaaaaagtgtcatctaaaaggtgacatttttctttaaacattatcagtgcaaacaatatcaacaatttctctcataagtcagcatcttgaacaattttatggcctcccattaacatgataaaatgaatttgcaaagagaatgttggatatatttgttatttgtatattcttacctagtgtccagtcattaaacaaaccattaacaataagtgtatttggttagataattggtgtaaaaataaagactgatatcctatgaattttctttccttttcttttttataaaagagaaataatttatttgggcttatagttccagaaggttagagttcatgatgacagaatgaaggcatggtggcaggaataggaagctgaatactcacatcttgaaccacaagcatccaggacaaattgagaatcgggcaaagccttaagctctcaaagttcacccctagtgacacatacttacttcctccatcaaggtcatacatcataaaactcctagaacactgccacaaactagtgactaagttaaaatgcctaaaattatgggtgacatctcactaaaacaacgacagggatagaaaatttctttttcttatagctgtaattgtttcttttaaaatatattattaaccactgtcatttcttttgtccccttttattgaaaatagattttttctcacataatatgtcctgattatgattttccgttcctctaccctctagtttctacccacctcacatcccatccagatccattccatttctatctctcttaaaaacaacaaactggcttataagggaatataataagtgtaatataattcataagaattgaacaaaacaaatggatataaggaaaagagccaaagagaaggcacaaaaagagattctcaattgttcacacaatcagaagttccatgaaaacattaaagtggaagccacaatatatattcagaggacatgattcggacctgtgcagactctgttcatgctgcctcagtttctgtgaattcatatgatcttggatcatgttgatttatagggccttgtgttcttagctcttatactctgcctccttttccacagggttcttgaagctctaaggggagtggtgtgatggagacatcctgtttagggatgagtgtgccaagttctctcactctctgcataaagtctgactgtaggtctccatatgttttcatatgctgcagtaggaagcttctctaatgatggcaaagaaagtcactgatctgtgagtatagcagtctgtcatttattgctggtattttgtgtaaaaacaatagtattttgttttactctaggctcctgggctatctagtcttaggttcttgatccccccacacacttggtgaaatgctatgttttttctgtgtgtttctggttgtggcttctttatcaaatatcatgtgttcataggtgtgtggatttatgtctggatcttcaattcaatttcattaatcaatgtgtctgttttgcaccaatgccaagctgggggttctatttgtttgttttgtttttaactatatattctgcagtgcaacttgaaattgtggtgatacttctggcagttcttttattattcaggattgctttagttatcctgtttttcttttcaacgtgaagttaagagttatccttttcaagatctgtcaagaattgtcttggaatattgatgggaattggatctttagattgctattggtgggatgaacacttttactatgataattctgctgatgcatgaatatgggagatttttctatcttctaataacttcttcaatttctttcttcaaagacttgaagtttctatcatataagtctttcacttgcttggtaagagttatcccaagatatcttacattttaaagcaattgtgaaaggtgttgtctccatgatttctttctcagactgtcatttgtctacaggaaagttactttttgtgagctaattatttatcaagctactctgctgaaagtgtttttcagttgtacaagtttccaggtataatttttatgatcacttatgtatattatcatgcatttgcaaataaagatactttgatttcttcctttccagtttgtattccccttgctctagctaggatttcaagtactgtattgaataggtattaagagaatggacaaccttgtcttgttctggattctagtggaatggctttgagttcctttccatttaagttgatgctttaagtttatggacttgctgtaaactgcctttattatatttatgtatgtccctcttatctctaatatctcctggacttttatcatgaaggggtgttagatttttttcaaaggccatttttgcatgaaatgatcctgtgggttttgtcttttagtttgtttatatgatggattacacttatctatttaccaatatattgaaccacccctgcatctctgggatgaagcctacttgatcatggtagataatctttttgatgtgttattggattcaaagtagtactagggaggatggattggatttggaggggaggaaggataggtgaaggttgcaattaacgtatttgtttccttgatccaaatgacctatggattcccaaggagaaccttctggagttgaggtctgggataaaatattgggatagggaaaggaaatgtggagaggaagatctgtgtgatccactggagataagggcaggatgtaaagggaggctagtgcaagtggtctgccacagagttggtgataagactggaggattggttttggaggagctgaaggagaggtggagatctgcagttagcctccctgcctccctggctggagtctgctacagtttctttatacaacaaccaatttaaaaacacaaaattatcaatgagcaaattaagggatacttgtatagaattcactggtacaaaaatgaggaggaaaacgtgaaattctggcagaacatgtgcatttcccatttctgccaaggaacttgctggcaaagagcgaaatgcctgttggacatggaggttggcttgattcccagtgcaactggcccacaccttgtttggcatcatagattgaagattttgcatgctcatagggccaatgtatggtatttccacacaagccttcttgtattcacctcaaaggtttctcttctttcgaaaagataagctgcacttttggaaagccaagtatggtctagggattatcagtaaaatatcaacagggaatgtgttagaaactttaaggtgtcaggctctaccccagactttcacaatcttttctagaccctcaaatgactcctatactcatggaattttgagaagtactaatctgtacattcaaagtcacttcttcatcctgccattatctctcaagtgctcagactaaaagcgccacccatgtcaggcttcatagaaccatttaagcaaagttgaaaatctccagccttgaaacatgctacacactcgggaaccagtgttctcctcccattttcctatgcctgcactgtaaggatattgcctgtgaaaatcaggccagagttgtaactagggctgcatgtcacctaatcatgagaatcaagttctaggcctgcttcacctctagtcctgtgttgtctgctatgtggaagcacagaactccacgtcaatatggaagctgcagtcttgagataaaagagaaaaatactcaacagtaaaaatcttgtttcccggggaatgagtcttgtgtaataggatagaggcatccatacaaaaagcacagggacagaggactgggagaaggaagattcactatggcacaaatgcagttcataaaaacattgctcttaaaagaaatgaaggacttaaaagataggcgaggaatgtcctttccaggtgagatgccctgaaaaattagactcccataaagtacaagctagtgtattttccccagctgagtaggaaaaaatgtttggacaaacctcttggcagtgataattacatgggcacctggctacagttgttgctttatgattttctacagggttaatgttaatggaatatgagttttatttaatggcctctactgttttttttttttctggtattagttttcacattgtgaattctgacttttgtgtcaggttgtacaggaaagtcatttagaaggtataggtgataaaaacagcccaagtcctgtaaccatgatggcttgattactaccttggtgaaaaggctgtgatccttacgttaaatcatttttaaaaatggctttcaatgtaggttttcagaactctgtctagtctcttggcatttgaaatagtaccaacaattgaagtacagcagtgctgaagaatggagagttcatgggtaatttgaaacacaagatttcaacagctcagtggacctgggctgtgaagagcaggcaaaagaaatgcagactacaaacataatgaaggcaatcaatccatcatggtggccagtaagcaagctcatgttaaaatggagctgtgtgccttctgtcacggcaacatattcaattaagcaatatcctattattatttctcaccttttgtggtttaacaaaaacattattgaaacgaggagcaatcactctaaatacaagcaaaagaattggttggaatcgtaatgtttttcacaatccctgacaggtaaattatgaacagtggcaggaaacctctgtagttcaacagtagtttgaatactttctggccaacaggtgtgggaaggttatttttaggagtggttgctgaaccatttgggagggaggagatgactgtgtgtttcttttgaagggtgagggcttgtagagcagagtgggtcaggttaggacacggttcatcccagaggagccctttatgggtactcttcctccaacactgtctgctctgaagctgctgacaagggcgggtgatttacacagcctgtgcatcacttcctaaatgacatttccaagtgactcattttaaacatagaacagtttgccaagctattgtcccaaactgaagataatttgtatatcatttcctgggggacagaactcaatattgtgtgcagcaacatctgaacttgaaaacactgagaacggtttgcaaagaagacaggctcaaagtcacatgtgccatttcttgtacttttctgacaaatccaggaagcacagacttctctcaagggctgctgatctacaaatgatgcaaagtgtaacttcagttgtcattaaaatgtcattcaatgacttcatggagatggcttcaaagactaggcattgaacagtgtagctggtaaatgagtacatgctatataccacagagcatgaaccaatcacaaacaagggacctataacaaagccaaagattcagagagacttcatctgttggcatatgatcctgccctaaaacattatacatccttaaataggctattgcatttgctaaatgcataagataaaaagaaacacattaaattttaggtataatcattagaaaatttgaactattgctttctgatcatgcacctccatctggcgaatttgctctgatttcattgctacaggatataattttaaatatgtaagaaagttccagatttcccccaaagtctttatctctctgtttcagttcacctgtttagtgattcagtgatttattcatataaaattcataaaatccatttatagcagcatttaattaatccacataaacacactgttcattgatgtaagggtcaaattgtcaccatcttcatcagatcagctatacccatttgcaaaagatcattacaactgggctggttgactatgaccatttcatcttaggagaatggatgggaagggtcatgggaccctcacctgagtatctgagtatccaaacactcctccaaaccaactgtatgaaattttggacatggcctccaggaaaggctagagtgtagagagtgggaacaagtaggtaaagtaaaggtgttccatctaggtgttcatgaaggaatcataatctgtgttgggtgaagaccttccagtgtggtctttaaggcagcctgcactcctgcccataatcccttatccattactccaaaggaagcctaataaacatatttcttcctcagagtgtactttggtggaagtgtacctcagtttgttgttaggaacttaagaggaaggggcagacatgttcatgtctcctctggagaaggaattttagtaatagctataaactgtattacacacaaatatatgatgttgtaatattaagcatatgtaataattttaaacttgcaatgtcttgaaattttccatatgtcagacattgtttattggtattgtatgtgtggtctgccatgtaagtctcagaataacctcatgaatgaagtgtgattaaatactctacccattttgctgatgtgaaaactagagaaaaggggaattaaacatttgaatctaaattcacatgctggtgtgtagtgaagcaggaatttgaaactatatttactagacactgtagtctgtgctttgaactacttaattctgatttctattaagtagggagatgggcatgcaattataattattgtatatttgtaaaatgaatcaaaaataggctatagagaaaaaaatagctttaggtttcgctacaaattttaacagcatgtaattctttgaaggatgtacccttgaagagtttgtaggactttgagaggaagtgacaaatactatgtaaagtagatggttgtgattacttaagaccatgaccttggtagatcaagaggcatacggacagatggccagtgatgctatgacattgtcaggaagccaacaaaattactgaaagctgcaaacaccaaagaggtgagaagaaatgctcatgaatggcaggggtgcaccagtgtgatgctagtaattagatctgcatggcacagcatccatctcagctacatttcccaaactgaattggaaaggctagaatcaaggaaaggaaggcatttgaggcaacgtgatgcaaaggagtatctgagtccatcataaaatgaatgtcacaggaggaaccaccatgcaccagctatgcctagagctatgctaagcacatgcagggtggggaccaggacataacaggtgtctgctttttgtcacagacttctaatttgggggttccatttctgattatcttccaaactgtgcttttttattttatgggacaaggacattgatactctgaatgaatggtctgcctctattgctggctgcatgactggcctgctttgttgctcaacagctattaatggatattttctgtttcatcagaacctcgctgtgctggctatccctagtgtattatcaagtgcccttttcccactaccaattaagccccaaagataacgggagcaaagtaatatgcaattcaatagaatctttgcaatatttaaaggtctaatattaagggctgtattgggttattgagcattcaattaaagtgcctcaagtgtttaatttaggattttccataggacaggtattgtttgttaattagttaattaaataacaaatgattattgaaaacatgcattaggattaagcaagctgcaagagagataaagatatctccaaggcaattagctcactgtaattttaatgataaatgtgtaattagactcttattctaaagagattgtttggaatgcttttgcaagcattaaacaggcatgtaacaagatacttacttatataacaagcaaaatataattctaattcttattaagcatcagcctgtgtgttcaaatgatgcataatttgctaaaaggaaaatttttacaagtattagtacttataaaaatataatccattaaaagcttatgtaactaaattattttaaaaccagatttatccccaagcctatttatttcccttcttagacaattactggagcctctcaaatgtattaggactcagtgtacatttatgaatttatgcatcagcacttgagaggattactaggcacaacacaaatccccgcccccagcccagcccagggtctacttgcaaagaatcaaacagtgttctcttacaggcctagaactgctacagttctggcacaggactctatgtgtacacatccacacagacttgaatgaatgtagtcaggaagtgtagatgtttctgatgatgtgtaaatctgttttattgtagccctaggatgccatctctgcagacaccatgttgctgtagatttactattggtagccagcagccttgttgagtagggctggggaccatcgtagactttgaaggccatgggaattgccttagtgataatcatactaaatataagaaaattagtaattgctgagtttttcccttattaccataatttaaacttttagtagtcttacaaggaatgttcctacggctcatcatcaaccccaaattcatttccaaattagtatgttaatgatatcaacaatgtgaaaactgaatccaaaaagagtgtttagagttgcagtccttgggaaataattaggtttatagtaactttgtaacaggcataaacacagacacagtacctgcccctatttcttgccatgttgccttgggatgctgccagaaggccctcaccagaactgggctgattccaggactaccccagcaaacttcccaaacaatgtgctgaatcaggcccttttctttatggatttagcctgcattaaccatctcctttccgtggctaaccaggaacttgtgcaagattagatatagttagagaaagtcagccctgtctggaatttcaatagagaatcagatggggagtggtcattggctgtctcccagattcactctcctgttcaatggtgaaacatatgttgtggaagattttttaaagttatttttagtttttgaaattaaaatacaattacatcatttccccctttcctttcttcctttggtccctcttttgcctctctgcttgttccttctcaaattcatggcctattatgtccatttgtgtttactttgtgaaatcaggagtcccaatatttgatgcatagttatttctgtcacatcatctttataattttttcctttggttaatatgcagtgttcgtctctatattgttaaactaattttgttttgatgtttactttatcatgctaggacagctctttctcagtttacatttgcttgataaattgacttctctgacttaacccgtaatctattgccagtgaaatatgtttcttggaaactataaatactagatttggggtttaaatttttaagtatgagagagagagagagagagagagagagagagagagagagagagagagagagagagagatgcatgctgtgacattcacatggagtagctaaaaggtcagctgtgtccttggtctatctttccaacattatgtggattctggggatgtaatttggatatttgggtttgtatgacaaatgccttttatctggtgaaccatcacatgggagacctatatcttatttttaatccagtcatctctgcattataattggagctatacctatttatatataaagttattattgaggtaagcaggtaattacaggaattgttctgagtgtgtgtgtgtgtgtgtgtgtgtgtgtgtgtgtgtgtgtgtgtgtgtgtatttcttttcaccctcccattctaccagaggtttgctagtatactgttggagatgatactttgtcagttcttcttcattagtttattcctttcatgaaatttattccttcctgcatcctgttgattgagatcacccctttccccttctgtgtttagtgttcctttatcttttgaatactgggtttgtgaatactcgcctgctttatgcttatcttgaaatgtcatcgtttcttcaacaaatttaagaagattttgctgcatacagtgttcacacttggtagttcttttgtgggggacttgaaacataattctatgatttctagctttttaggatttctgatgaaagatttaatgttctgatgtacttaactttgtaagcaagctggtattatttttcttagagatttttgatattgtttttttgttttctaatttcagtatcatggctataattggtcatgaagaggtttattttctggtcatgtctattcaggcctctgaatgcttctcatgcttggatacctgtttactttcctaaatgtggggaaatttctgctgcaatatcattgaacaaagttcctgagacattcacactctttggccctggctaacctggcatttgctatgtaacccaggttggtctgggattcacagagatctgtatatgtttgtcttcacctgagattaaagatgtatgtcaccatgtccagcaatttccttgaaatactgtgtttttagtttttgtcttagatctttcttctctgccctggggtcatatgcttggtctctgaatccacatactggaatatactagttgtaatcatgtttgtttatttttttctttactgtgcttcaatgtagaatttccccaccttgtcctacaaacttgattgtctttttctgcttggtctaatctatgatgtgtgttttctgaaagtttttcttaggtaatggatttttcctttccaacatttctgtttactgtgcttttaccaaatatcaatttccttgctgaatttctcatccatgactttcccatctaaattgttggcattttttcttcaattcctgaactgattttcttacttcattgatctacttgtttctttgaggtctttggtgggttttaggtgtgtatttgtgaattattctcctggaagttgaactgtttcagtttattttaatttagtagtggggttacaatcttttggctggttgagctgtcttacttttccatgtgtcctaggctttagtattacaaattgtgtcggtttggatatctcctctagttgtattcatggattatcttgatattcagcctacacaggagggctcagttgtcagtacaacatgggaggagagaaaaaaactgcctcaacatcaggacaccaaatcctacaagacatagtcatagacttaaaaaaacttatctcattagtgtaccactaataaccacagaattgaaactggcaaccatctaaaatatgacaggaacttaaatcatttaggataaagaaatgtagaagtaacacatggatggcaggaaggaagcagtagtgaaagggaagtaaagaagaaagggataaagtagaaaagaatgttgtgaggagaaatagaaagaggaaataaaaatgagaaaaaagtaaaagacttcccagtagtcataaaagcacaagaacaaaattatataaatttaaaataaaaatatgaagtggttgagtttttcaaatatatcaaaaattcaaatactatttaagcatataattaaaaagaaaaaaagaaaaaaaaacacaagaaacattcatcaaaaaacccacaacatatatgtatatgtgtatgtgtatgtatatgcacatatgttggacatttttaaaggcaagatagttggctcagtggagaagatgtctgctttgcaagcctaggacctgagttcaatccctagagtgcacacagaggtaggaaagagccaactctacatagctgttctctgactttcatgcatataccttggtaatacacttccagtactcacatcatcccctatcacatacacacacacacacacacacacacacacacacacacacacacagccttccatgactctctctcattctgggcttatggcaggttgaaatcaggctccctgacttgtagttgtcctctgttctcaggcccccaaggcacctcagttttacacacccattaggatggtactggtcaagagccctttgagccagtggaatgtccctgccatcttctccccactgtaagaggatttagtgcctcaccaaaaccttcaattgaatttgagtcctatgagagctgagtttgtccatagggtagaactgtccacttcttttcatgggactgtctgacttatccttcagatgaggcatctgcctccactactgtccctttgtgaattcccagtgttaccctccatttggaattgagcctgtgttttctcattctgagtgtcccccttcactgtgtcacatggagacagcctctaatctgccaccttatctgaaagttgccatatgtcaaggatgcattttataaacccaaacagaacactgatgtggtttgtggtgatatcactaattttggcactcaggagcagttagtgagtggtggcttaaaaagctatagaagccttgttccaccagatatcaagtctgattaaggcacaagatcaataataaagaaactgaggaggggaatggagaaagatagagataaaactaattttaaaaagatggctgaccatcttggataataccttcccatttactcccactgaaaaagggtaagtatagttaatatttacaaaaacttgaaagtcaaagaaattaatctacccagtttccaaagtcagtaaatggtaggccttgaacctccgattcagggaatgcaaagcttcatttcaatgcacttttcagatatgtgaatcttctgtactatcttcaaacttacctgtttaccaaggaacatcttatccccttgcttgtagcagtagtatttccttttgtgactcaagaagttccatttctgagtgagtatcacatgcctttgtttcatcccttaaatccatgacagcaaataataagcacaaattcttagtgaggcaaacgtcaaccaaccatttctgcctctgatttctatttgacttacaaccagcatttgaccccaagaagcctctggagccttgtctgaggcttacacaggaaataagtttacccaataacatattcagtggaagccagggagggccactggcttgtttctagaatcacaatgtgtgaaaccataatgaaggaccaccagccagttgtggagtccagtagcgggtctattatttgtggaggaaaaggatttaatgtggggttagctcatttttttctccaagtatcagtctatactcattaggtcaaagaaacctcttttgaaacaaaaccacttggtagcgcatttttcctgaaaataacccaaatattctatgtctttctcagtgtgtgtgtgtgtgtgtgtgtgtgtgtgtgtgtgtgtgtgtgtgtgtgtgttttagtgtatatgtaagtgtctgttagtttcttttcctgtaataaaacactctggcaaaacaactaaagagagaaaaggcttactttaccttacagatcaaggtgcagtccatcatggtgaagaagtcaaaccatttcggtggcttcattactactgtggcaatgtgaaggatacataggtaaatggaggaaactggagttctgttaggaataatgaagaggagaaagcaccatgtgtggcaacataatccatctactatcaggaggcagagtaggatggatgcatgtacatgctagtgtcctgatcactttctccattttatacagtccagggttccttccccagggaatagtgctacagtcagtagcagagtccttctacctcaattaatataatcaatatcatcctccaaatttatgctcagaggctgtctcccaggtgattctagaatctgtctagctggcatttaacactaaccatcactatttgtatatatatatagatatagatcatatccatatcatatagttaaataaatgttgagcacacacagtatttgttgtttactgccagttagctgattaagtacgccaaaggaatcatgtaaacttcactttcctgcttttgctcataaagatctgagtgttcctttagagtgagtgtggttcccatggtcttagccatggtttctgaagatactcttgacaaaaataggatggctttggagctagtataaccactctctgagttgggtgaatctgtctctcctggtacagtgcaagagacacctgaataaatggaggaaaccaggcttacattggaaggaatgaagaggacaatagatgatggatagtaactgtcagggcccaggaccacaaagctgatactatatttcaatcctcttatcaattggttacaacctttccaaggggaaagaacacaatcggtaagtaataaccccaaagtctcagcaacccatagggacctttcatgcctactgagaatgaataaggagtcccaaagtcatgaccaagattcttactgagagatgtttatataacctgaaatggcccacataatctgaggtggttacaaatatttcttagggaaagcaacattattaaacctgattctgtagcttgataaaggaacacaacctttgggattgggaaatcaatatttgaattcttgtcctgtaattattatcatattagattattctgtacttttagggtcagtcaaagtctgggtcgaaagctatgggaaatgatggagcccttcttactatggagtctgactgatgcctttcaccagctgagaattcaagatttcagcataagtatcaacacttgctgcaaaagtcaccaacacagaagtaacatttttttatgtaggaagacttttcagatacacatgttaacaacaaacagacttatagctgagtgtgtactatttcaggtaggatcttcatctgctcttggatatttcctggaaatctcagaaataagaatattagttttgtttacaggatagtattgtcctaacttcttacatatctttgatctagagttttgccttatccattgtgactattcacacgcttttgagatgctcttggatctactgtagagttctcagccatgctgtaaagataacaactgcaaaccccacctaaactgtatatggccactgtaaagacaataaagtatgaagttttcttgagagaccaacacctacaaagcctcttttcactaaccctgcctctgccctttcctgttgctgggattatagacatgtgccaccgaggctggccttaagaatcattaatgcttgttttttcccctatagatggagattgaaccataggcttcacacacaattactccaatgttttattcctgaatgtctctagcacatatggccaccatttatcatagcacttgatccaaatttatcttagaacttggcactctttatattgaggaaacaatcttagtataggaatatattaaattaaaatttggacttagagttatttaaatcatggcttgatgttccaaaaacatcatattttgaccctgaacatatttccctttacttccattacatatctagtttaattattttaaaattcatctaatctaaggactttcctcctcatattattgctacttggaatgatggcaaggaatttgaatttctttaaagcatacttaactgatattctaagccaaacttggtttggtagctccaaatgaactctccttataaagcatttttaataacatttgtgaatgtctcctctcactgaaagccaaaatgttctgcataaacagtaaaacaaaatggggcatggtccatttaacaaacaacagctatactgtattactacttgcttaatagcatgcagggaacttctaaagagatgtgaagctattcgctaattattcccattaactgttcaaatctgagctttttcacgatgttggttatgaacagtaaaactaaatcaagtggtactaataataattttcaattaaaaacacaagctagaaaatgagctgctatccaagtctcattatttgaatatacatatatatttttcccctcccatgaacacaaaatgtagttgaataaatggtgagattttattattggatatcaagagtgatattttcccccaggacttgaaagatttaaagctcttgatcccacctcctgttacttgatcagtttcctcttgggcactgtttgaaacttttgagtgatttggtaattcagagcaaaggtgagttaggaattagccagggggctaacatttgtaataaaggtgttctggaatagtgtgtgctcagttcttaggaatgtgaccctcctgctctcatgtatcctgtgtggaaagggagagactgagcaatgaaacagaggcaaggcttcctagtgtctccttatttgtcttcctttagggtttcttcattcaaaagtctattcatttcttggatttcagctaagggaaatggtcacaaacatattctgcaccaaggcatggcagttggtgaccattggctccctagagggctggagtatattgtaatgacaacttgcagagtgtggactgttgtccagatttcaggctttaatctgccatgattgtgtaatccagaagtgccttaagcatttttttctagataatgtgtgacattttatacagtgtctacgacagtatgatctaaaattgtaggtgtaaatggaaaaaagtaggaaaggtacaagtgtatgcttgtttgctggaaataggacatttcttctctatttcccgttactcaactttaaaagttctccttggaattttaaataataaagtaaataatagaacaaaaggaattaaatgtccaagaaatcctaggctgagataaagcatatatagcatgtatctctgatgtataaggattaggttgcaagaaaaggaatcttagtttaatagactgtttctaggacctaaaggccttagcaggcaccaacacacacacacacaccacacacacacacacacacacacacacacaaatggtgcaggaagaatgctctgaagattgaagatggctcagtttgtaaagggcttgttatgcaagcatcggaacctgaattcacagccctaatacccatataaaaggctgagcatggcaggacttaactagttctagcaatgggggaggggagacaggaagagccatgggacatggtagccagggaacctctcaaattgatgagagatgctgtctcaaaaaaataaagtggacgataatgaaagaagacaactactatccttttctggcctcgacagaaatatccatacatttgaatgtatatgtccacctcaccccacaaacatgcagactcacacttacaaagtaacagaattcatggagtttaaactgaggctaaagttgtttgctgctgctatcatttcttccttcttccttcaaaggaactgtgacttcagaagcaagatgacaggaaataaaggttcctgtcctgagttctagtgagagttcatcctggatcaggattgggccatgtgactggggaggggtctgaagatgctaagttcaacatcttgctcttactccactaaattcagagtgactcacccttaggatgctgatccataaaatgcccttgtagatactgatctaagcctaatgttacatcatttttcttgtctcaactactcatggtcaagtattccttggaacatgataattgactattgagcttctttgtatttcagaaatgcaaatatggtccatccttgtatctcacctcaaccatgccacaatagcaaaatttattgcagcatcctttccaaataagcttgaattctgccttgaattcttttaggtggcccaaattggaagaaacaagcaacccaagcccccatattcttactccaacccattttagcatattcaattctatcaagaaaaatgggtgagtgttagctaaatatgaatgcatatttttaataccaatccagggttaatgttgttttcaaccaagaaatgtgtaatctccacagcttaatgtgccatttatctcttgcatttggagattgcccatgctggtgattaagttatctatctgatatttatttgaatgaatgcaaggaatgcacaatcaatattctaagaatgcaagcaactatttggtatgtatggaaatgtgcaagattgagtacccgaagcttaaaacatttcattctctgaaatcttagttgaaaatgccgagatgagctgcagcaagcctcatctgaacagaaaaagcccccaacctcactaataaaactttcagattttttgattgaatgccatttgaaattaccctcatcacgttaacgtgcaataggtagtgtgcagtagggctgcctctcgacatgaccctattagagattgccacttgtgaggaaatctattcaaaagccgagtctgtattaagctggataccaggtcaaatgacactatttgggggaaaaatggagaggtacttcagcccaatgatttgtgaaaagttaagtaacaacaaattccatgaatatgaaattgtgggaagaatactctcatcacagctttcacccctcagctctctatgcagaaggtagctgcgaggattagaaatggcacctgctggcgtgcctgtctcgccttttctttgaaaggatgctttttaagattgtgattttagagcttgtgagatggaaagaggaaacttcagtttggggttctcaaaagttcttttttagtcagtaaaagggatagggagaaagtacagtgtgagtagtctgacatttcttacctatttttgcttcgaagaacctttgtatattcatgtagttggctgcagagatgttgacagtttcagctggaagctggggaaatctcggggaaaagcaagaattgctttctgcattaataaaggatggaaatagatttggggtgcacatatgaatttatgctttgcccttgaagcttcaatttttatgcactcttcatgggaacataatatatgttaacataacaacaccacacgatacattgatcatcaaggcatatcaatagcaagaggtgcagataaggagtgtgcagctccctagatgtttgcaaactgaacataccttgtgtaaaagaaccaagatcaagaaatgacatgcacaccttttcatccttccctccagtgttgactctactgaaggtcattacttctgtggctttcagatttgttttgccatttgtcctctgcgactttacaatcactctgtatagatccttttgagcctggtattccacactcaacatcacatttgtcatatacacttttgaatttcatatttcattttatgttattcattctctttgttacattttcattatgcaattatgtacttcatccatttgtgatgggcattgcagctaggacaagcactgtagttgtgagggctctggtatgggttaagtgtaagtaggaataggacttctgggtcactggctgtggctagagttcattttgagtgaatatgggcaattagttatctaaaggggtggatgtttactatcctgtatttggtaaatgggaactactgactctatctttcatcctgaccattgtcaactcctccttgtttattttagtcacctctggggatgggtggccattggcagatttgtggttgttggggatatcaacattctcttcatagtcctggattcttcagtgtactgagtgccaggatggcccttggttaggtttctggattaccctcagcattggtaaaagtttgcaaacatagtgacacttgtgaaactgaggtctgtatgaagtctaagagttgatgctctagaatggaatgacacacctctctgctagacttcctttcagtggctttgctaaacatctgtacattctaggggagcatctgttagaacctaggacttttctagatactgtcccttgaagctgcttgtcaacactggaggcttagggatcctcagctcctgtttcatgcatctgtcacgtgcacaggatattgtgaagcagtctttcaagtcagtttgctggaagacttctctcagtcattacaacagttccctgggagttaggttgtttctaaccttgtgcacagctcaggggcacaaagtgtgcctgagacaagctctgggaacataggactatgtgcagtgccatgagatctttccagtctcagactggacatccctttcactatgaaaccatttgtttatgtggctgagatgggggatattcatctgtaggtgccttataagatgatcatcagcctctaaataccagcctccttcctcgagtatttcttgtctgcttatgggatacatatagcaatattccctcacctatggaaaatacatccccaaacagtaagtggatgcttaaaactttcttatgcacgtgcatgtgtatgtatgtggattgtactggactctagacagacattttcctatgcatacacacctatgataaaatttcatgtattaattagacataaagattgattggcagcaataactaaaaattaaatacagtcatgataataatatgctgtaaaagaagttatttaaactggtgaattatttatttctggaattttccatttactgtttgtgggtcattttcatcccaggtaagggaaaccattgaaagtgagagcaaaggcacgatggaatcgctgtgttgcagagatgagtggaggtaactgtttcattccttataatatcttctctaagctatgatttttagtgtgaactccttgctctactagcttgattattgaaatttacattcatctatggtcattttgaaaaaccacaagtcctgctttgcactcacaacagtcgaactcttatccatccggatctagtaacttccagacctaatttactatattttcaacaaacatactcaagaatgaactggctttggatggtatttggagtgtatcttcctatgtaaatgtgtatacagttatttctgcttaaatgggggaaggatagagataggtagagagggggagggatagacaagggagaaaggagagggaggaagggagagagagagagagagagagagagagagagagagagagagagagagagagaggtgaaaatactagaaaaatatggctctgtatcatagtactatccctattcccttctgtagctgtatttggcatgtattcagggggtgattgcaacagttagaggatttatcctgcccaggagatcttttaacatcgctatgtaataatctctctttgcatctttcttaaaaatatgaaaatcacaatctgagtattaagcaagttctccagagatgtgtgggcttttttccaagaagataatttatacataatggaacatgagaacataatatgtcatgttgataaaactgatgtgataattctcattttcaaaggtattatttttgccagacccccaagtgaggtaataatattgtggctgaatagtaataaaaactttagtgttcccctcttctgtaatgcagcctcctgatgtatattcagcaaactttcctggtactcctacctcttcatactcaagggtaagcaggttaaggcagccttgaagtcctgattttcttgcaggtttgaagcagttgtcctttttcagacagctgtggtgaatgatcagtaagggacactttgattggttgcttttccttgatgtcccaaagtttccacttactttaatcaaatgatgaaatatgtcttagtatataaaagccagggaatgtaactcttaattttttctctctttaactatgaactcccttcttaacattgatgtccatatgcctctgaagtgagaagcctcttttgtcttcatgtcataataattttctctagatagatcagaaatcattttattgcagttattctatatatgtgagcacacaagcagagagaggaataaatcatggcccatcattctaaggcatttgctgtctgggagttgacacaatcatggaaatcaaagcgcagtgaagaatcactgatactgggatagaagaaatatgacgagacaaacatgtggggatgattcagtgctttttacattggggatggttctttttttttttccattaaaaaagctgcatgaattggacttagaagtagctatccaaaggcatagagaagttattccctgtctcaggaaatgagacagaagctaagctacggaattgtgcaaccacatggggttccagtcacctctgagaatggtgagtaggctacagctgacctcctgggtgagaggtagatctttacactgcggttggtggagctgtttggatttggtcactgtgctggggatggcagaagaggcatacaattaggcacactttgcaccccacacatcaatcatcatagcattccttcttgcagtgaccagttgtgactggatctttctaatctcttgatgttggcataccaggtgaagttagttagtatggaatctagctccttatgcttttgtgttatataagggaaactaaaaggaggcgggctggagccaaagcacatgttaggacatcttgctaggactagtagcaaaggataggagatgggagagcttaaatggaaagtcctctcatcattctggaagctgtacggtgatgcctaaggtaccagctggtttgaggagaggaaataaagggtgttttcacttggaggtaattcagaaaagcattttggaggatagatatatcagtttatctttgtctacactcaatttagaaactctaggattttgagtttgtccagaaagtagctggctatttgagtacaagctacttaatactttacttaagattcattgttcttcaataactgcattgatatttttcactgtgaaggtgatctcatctgaacatgcaagaaaatggagagtgtctaggagaagaaacagtcacaaatgctcacagtcacagtaagattcaggaaaggcttctgtcaaaatctcactccttctggatgctcttgaaatgattttgcctcagtttctcatggcgtatttcacaggggtagtgaaaataacattatagattctccattgtttaggagaaatcaatgatactttgccagtagcagcttcactggaataaataaaactaaatgagcaaaattccccacagcatgggaggggtttcaattggagacatttctaagatgtgacaggctggaccttttgaaatagctgataccaaccacaggtctcaccgcttgttgcagatgagtgcctttccaaagataactagtaaacaaagcttcatttgacctataacagagaacaatgttcaaggaatcaacagtacttacaggagatgggggtgggacagagtgaaaatatctgttttgttcagtggcaaaaactgaccttatgtgatgattcataattacaagtaagtgtgtaaactattacaaaataactgcaatagaaattttctgtaactccatgtgttactatgtattagatttctcacagctcattcacatacaatgaggttagatgccattctaagcagagtggcatctaatttttgccccaagagtacagttggcaatgtctggggatttttttttcctttcaagagatgcaaggaagttagtagtgataaacagtggcagaggtcagggatactgtaaaccatccttcaccatataagcagccccctccaagaagaattttctggccaaaatgttaacaaagtagaggctgagaaagcatgggttgaggacgaaattaataacgtttgccgtacaaagcagagaacgaattttctgagttgatgtcccattctggattgaattccttccttgtcagttatgcagtgggatggccatgctgaggaggctagccctgtgtgtacatatgtgcatacattctactgcttgattcattgatggaatctgatttgattttgtgctactgtttacaagatattttcatgtatattttcctattcaatgtattaaacgtcagtttgtatgcctccagttttagaaatgaagacaggggaaacagtcacaaagtgctttcccagtgctcaaaacttgctagtgttaaagtcaaagcagcgattcatttgttcctggaaatctgcccaatgtttactaggcttttactatgcactgcagactatagcaaagttcttagatcagtccttagatcttagatcagtgtttcctgaactcacagcaattgtttcagctctcaggattggaatttgagcacttgaacaattctagaagtagagatgtgtttgcacttgatttttaacagtatagtggcatttattttcacagtgttctaagagttgtgaattaccccagggcagaagaaagactcactaatcaatatcgtacagtattaactggagcaaaattctcattttcaatgtcatatttctatgcttagtaattttccctcgactaaactggctgtagatcatggatcaagaaaataaagtagagaaccaatgtgagttgattctccagtttgcattaaatttctttcccaagtgcttccttggttagctatgatattaaggcttgtatagctatgataataaggcttgtagtgtatacaattgtatgtatgtgcttgttttcacctcatgtgaaatgtttaatgcatctgttatttttcagatatataattatacatactccacaaactctacaatataagggcaagaaaagatttcctatttgatactcttcatgcaaggaaggtaagtcatgaattcagagccaattaataagaggaaagtcaggaaaggggaagccaaatctcaggcatcctaaatgccagttcaatagacatcctaaccaaatgtctatcttcttcacatagttctgtgtttgttaactgttgttgattagtttttactctttggctcttttttactcttttgggggcccaccttccagatcccaaataaatcacaaatggattttttaaaaatatttataaatgcctggccttagcttggcttgtttccagctagcttttcttaacacaaaatatcccatctgccttttgcctctgggcctttacctttctctatttatgtatatgttttctttcctggctgtgtggctgggctcttcttttctaggtctttgatcactcttgcttttttctccttttgtttattctctcttcccaccatcctgcctatcctttctcctgctttgctattggccattcagctctttattagaccaataaagtgttttagacaggcaaagtaacacagcctcacagagttaaaccaatgcaacataaaaaatatagcacatctttgcatcattaaacaaatgttccacagcataaacaaatgcaacacaccttaaaataatattctacattttccctttttgtctaaaaaatgaaaggtttttaaatttaacatagtaaaactatacataacaaaaattatcaagtaaaaattacatttacaatattcattccatttgtatttagcaaatttagagaaaatactccaatatgtagtcttagtgactccaaagttttatgcctaatttgctttctgtcatgactaagaaaaattataactctaattatttagtcttaaactccattaaagagcccaagaaagatgtattattacctaacaacagagacaacttgctgcttggatagttactcaaagttcttctgcaatgctggtggcatccatcttcagcctacaggcccagagtatctgacagacttttcagtgaagcagtaaatttgagggactatcctgctttgttttggcaaagttcaacaatcactttcctgtgggtcctgcagaatgtttggcagactgttctgtgaagcaggaaccctgaaggaccatcccaccttgttttggaaaagttcagctgtcactttccttggggtcctctatgttcagtttataaagcatattgtcaagcagtcaaggctaaagcagttttttacccaaatggataaacttggcacaatgaaagcaaacttcaatgtgtatcatcctttcatgaagtaaattagtgctttcagaagcagatgtgtctcattgtcatgaaaagtcctcagttaacaaaacattctaaatgccatattatataggtcttttacatttttgaagaccatttatctatctaaaatatacctatttaacctagaaagcatgcctaatgtgaccacaagtttcgttattacagatgaactactaacctcatttcttatttatacattgcattttaaataaactgcataaacagaataccccagacaagagtagaaacatatatacagtggaacaaaattaactttaaatttgtattaataccaaaatccatgtcaatgcaaaaactatttgagattaatggctgtctttttatcttatattcctatatttccctaaatataacaaacatctaatgacccaccaaaaggccaacagccacacatacaatttattaggaatgtgggtgtcattttctctatactgcttcctgttatttgtagacaaagaatctttaggagggtccctgagaaaaattgagaaaatggccaagtccattattatttataactacatagccttagcttgggatgggaagaggttagtattagtttttatgttttactaacactagaagtagaatttcagtctcttagtaagcatatctgaggtgactggccctattaccaagaaaaatagacatgatctctaaactttgtaaaactcccattttgtgttttgaagtacctagaaaaagacaaatgttttgctaaaatgtgaaaatgtatcttcttttttaatggcagccatcttatcagtgcttatctgatcatcctaagaatactcacataaaaagatgctatgtcacaagaaaagaatggctctaataaaagccagataacaactactgcttgagtatgtagagaaaacagaacccctacccattgtttctgggaaccaaaaatggcacagccactgtggaatatattttgtcaatttctcaaaattttaaacatagccattttctaccactcagaaatccaatttttgtgtgcctttaagtgaaatgaaatttcatggctacataaatacttgcacatacatgtgactgttcatagtaactttgctcagaatagggagaaattagcagtgacccagatacccatcagctggtgatggataacagagaatatgcatacattgaaattctctttttggggaaaggtaatattaaggattgaacctaaggcctcttacttgctagacaaatgatttacctgtaagctgtagccccagctttcatacaacagaatattattggcactgcaaaggactgaaatattggaatatattataatattgttgaatcaaaaatagtaagttaaataagaaattaatcacatttacctatgtttacttataatcccacattatctttttatatgaaatatcaagaaaaagcaaacatagaccaggagctgtctgaagctggtgctatggatgaagaggggcttaaaagtagaccgaagtattttttctggatgataaaaatgttctaaattagatggttggtgctgatagatgcacaactctgtaaatttattaaaaattattaaattatttacctaaaatttgtgaaatttttaagtgcaatgaaagaactataactcagtttaaaatggactttttccatttattattcttaaaataacagaatcaaaagcatggcataaatacaaatacaaatacatataatttgagatcgtatttcatagtaatacttttgcaaaaagaatccactgtactacatggcaggcattctctgtcactgtattttggctggcagttccctctttcaactgcctagttcttgttagttctttctgtcttttgtctcatcaccaggtaccattggatgacatttaaaatgagagtgttaatgttttagatatataatttgaagaatttgggtaaattgcacaatgagtgggagtttgggctgtagctcagttggtagagtgcttgcttatcacactcaaagccccgagttcaacctcagcaccatatgcactgagtgcaatcttataatccggaaattccaagagggagacaataggataaaagaatattaaagtaattgttgtatatacaacgagttccaggccaggctatatatgatctcatcttttttcaaaaatgccaaggagaactctttcaatataattcacagaattttgtcattcaggaataatgacatctggaatcctttcttctgtccacaagttacccataatgacagagggcagagaccagattttacagtcaaactccagccaagtacaagaaactgttcctcagccacctgccataggcagagaagggagtatgtttacagtcaaaaatagaaggaagcaaatgagagacagggaagtttacatgtttcttgaggtttctgaagatgcccatctgcctctctgtccatcattctttgaagtttggaggccagtttggctcccccacagtctttccctcccaacactgtggttacttgccttcacttcagatggagaaaggaggttcaaaagtttgagttcatctttggctactattttttaatcacaaaaaaataatcacaatacctgcaagtcacctctttgtacaaggcagggagaccaaatcaaagtagcaaatggaatgtgtaggttatttgcagattgttgcagagcaaatctaatcaccagtctgctgaaactccatcattatttcccttgacgagaagatcacagtcttaaatattgcaaaggagggagaagtggccataatccaactataacagtaacagccaattctgctgtgatgggaagaggcgctgtattagtgccaatacattaaccaactttccaattgcagtgggaaactgattgccattacaattcccacagcacttctccatgaaggtaactgaattgcttgagtagggttcacttcccaactctgcttgtctagcgcatagaggatggagaaagaaagagagaacatttagacacattctgtgtgtgtgacagtcttgggcaaatcaattggcttctatgaatcttggatggcattaacaacatgagagtgagaatacctactatggcttaacagtaccacgaattctttagcactcttatcaagaaattgttgtctgtatcctctgttcttggatctatgtgagctctgtgttgactttgatggaggtggcagtgtgccagctttaggacaaaaatcttataggaccatcaacttttactctccggcttcctaggaatcctgaatggtcactgacaagcctcactatggtccagctactaggttggatgggagaacctgccagtgattcaactaactgaatgtctccacagggtctattattgtagccatcttggctgagttatagacagggcagtgaaaacatctttgatgatccaaatgaaccaacccaggggctgtatatcaagtgtcacaactgacaacatatagggaagaagaattatagggctgagctctgtccaaattccttacctacaaatgcaagatggaacttaagttgctgtattttgatgctgctaattttgaggataatttcaataaatagccaaagacctactacaaagctattggaaaaaaataagtagaataataaaaatgcttattaaatcatagcttttaatagtattttattacaaatattcataatagtaataaaagtaagtactgtagcttgttctggtgttttaaatggcatcttttaaaataatttagagatctaaaatccttgctgacctgcaggttgagcttttaataagaaatgagatgagactaaagagatgggtcatgggctaaagcattggctgctcttccagaggacccaggtctcagcacatggtggctcctaatcatctgtatgtaactccaggaccagagaatctaatgcttcttaggctcactcctttctctaactcagcaaacttacctaaagtgtttattcctaacagcaagagtaagcctgttgtctcatctttccactttgatgttttctaataatttaatttttctatctccagagttagttgataaaaaatactgatatctatgagctcaatttccacccagttatattagtgagttttcgtgggccatgtacatgtcttccagaataacttccgggcgataggaagtagatggcacaatattacaagatacacattatttcttgcttaaggtttatagaataaagtgtgtcaattgtagttgtggttaataggtaagttttgttctggtaacagtgaattggatgcatgggagtcatttgattcatcttcatgccctcatccttaccctcaacgatctgatctacatcattttaagaaacttctctctgtactactgaccttcaatatcatctaacagttccataaatttctactatttattaccttctgttttaatggacttgagtcttttctaagaactttgtatgtgttggttacttcagttcttacagcaaccctatgagatgatttctcaaatgagaaaccgaagggtatagttatataactgtcaagatgagactgttaatgccagaagggaccaatggcttatgttgggcattctggaatttgggcttccaaacttaaatactaacttgtttttcttcgtagatttaagataacctgctatgttccatcaaacattgtgttgccaattacctatctttctgtcttctcctacctttattcaaattggatatgtatagtaccaatgattcattttaagtgcttagaaatgccatcaaaggtggatgcacatggaatgggaacagcctggagcctttcaatgttttctgccatgagtgtggagaacatacttttgtatgtcttagaggcctacacagactgcaggactttgcctcttgttttccacaatgacattttaccctatcaccttccatatgaggacaaccattactcataagacttgcaacacctcagaagcacatatgtgttcttggttccctactttgtaccttgtgctttctcaggggcagactggagtcctcctcctattgagctcctctgtgtagatgaggactagcttgtcccttagtgattgagtaaagaggaaagatgctgctgacgaccaaaagcagtaataacttgtatcatctgtgtactactatagtcatattagaacatcatagctttacctcactcagtgggaaatattaatatcaatgagagtttgagtcatctttctgtgtaaataattgccccccatcattctctcaccctgtatgtcaccataaaatgtcctttaacccccagcactcgggtggcagaggcaggtggatctctgtgagttcgagaccagcctggtctacaagagctagttccaggacagcctccaaagccacagagaatccctatcttgaaaaaaaaaagtcctttaacctagaaatgaaaaaattatcttagtggtctctaaacaaatgtattgtcatcagaagtgaaaatgacataacattctagggagaagaaaagtcactaagaactgaggatggccagaggactgacttattttggaatactagcacacattcacagattcatactctctgcagggcacaagaaacaggttatgttagtgtatgcaatttagtaccccatgaagaaagaaagcaagatgttcatttttggtgtttgtaagctgtctagattgacaagtagtgggtaaatatgatttaatgagcagagagaatgcaggctgcttttgcaattctagcacagctaaagaagaggaaagctgatctgtgtgttcttggtggttctacctagaaagaatgctaaatctgaataacagcaatcttctacagtaatagcaatataaggaacaagcatcctactgagtattttggcatctaattctttatccaagtgtgtgtttgcatatgttatgtggggcaggggtaatatttaggttatggagatgagagagagagccgtttttaagtgtactcttgctggtgttctgatataatatatactgaactcagatacctcctgtgtagtcttatgttacctgtttatatttctgagtcattaaaatggcacgttaaatattgtctataggattagtagaagtattaactatgttaataaagtccctggaagagtaataccattgggtacctcattgttgccactatcctgtacagaccatttatgtataagaaaacccacctgaagttttcttatatgtaggcactcccaaagtaattgccatcacctatcatttgtcttgtctcttttctttcccatgtgatttctcctctgtgtcatgattacactttgtatccaggtccagcaccattttcatcccagcagagaactcttgctaagacctttaatctctcaaagtctcagcctgctcacctgcaaaactgacctatgcccatcctgtctttagaaatgtaaatcagactcctactttagctaaatatcgttatcagagatagttaacaaatttcaagaacattaactatccctaatgaggaaggatctcttcaaatagttatcagtttaataaccagtttaatactcaactggacaaaggggcatgacaaagggacacgtgttctaggttccacacaaaggcaaaggcattttcaatgaatttcatggaacagatgaggtatgcggttcacacctgcctcttaggattaattctcagggtattgtgaaactcagaaaattgttatttcttgacctaaagggaggttaaaacacttttggcgaaaatcgattcactttgaggtatttagcactgttcatattttgtaaaagtctatatgacagggctgctttcaattggcactttgtgtagtagttgtaggaagcccatcacacagagagaggaatctgaatgagtgtttaacaagattggctatttcctttgtttcacttccagaataaaagtggaccatgccccagaccctaggcatccttgggtattgggaatctcatctatatctgtagcataagaagttgccaagtgattgttggaaaaataaaattaatttttcctgttgcttctatttttcttttgctaggggaatttctgttacacatggtcaaataacattatgtacaatgaaggaaatgaggtgtgatggaatcattcaataaaaatgataaatcacaaaagatcatttagagaaaaatgctggcagcaagagtttgagaaataggaaggtcttgtcatgggtttttcagaaatgctttcttaggaaattgcaccatttatagagttgttcttctcttccttgaaaagatagtgataaatttcaaacggaattaaataagaaataatgcaggctgtcagtcacgacttgagactagttgaagaaaattgctttctgaggggacaacgtgtaatcatagtcgcaaccaacaaatcagaaaacaaaccccaaattatgcaaattgtgtcaaggactaatatgtgaccaggagaaagaaagaaggcaaggatgagatcagccagagtgtaagaaggaaacagagtaaagggcatcatttacacagcattggcagacaaaatggtgctgctgttctgaacaatctggctgaattgagataaactgaatatgtgcacattgcaagacgccaggttgcagcacactcttaagtggaggtttcacctgagtacaaaacaaatgacacatgagaatattaataatgacactcttttacagacaaggaattgaaagcaagatagaaataaatgagaaaataaaagacaaacatttaattgaaatgtctaatacctcagaagtcatgatacgaactagtttatgttgtgctatagagtaaaatgttactaacacaagttgaatggctgtatacctaaattctgttatgcaaataggtcaaacatataaaagtttcatatataaaatatgtagagtggatctggaaaacaacattcaaaaatgctgactgtgacatgtgacatgttcaaaccaacggaaacagagtaatgtcacaaactgacaagtaaaggacatgaacctcactctttgtaccttaaattaagatgtattaactatctatactctaatctatgtaacatctatttaaaatctattacatgtcatgctttgttgttttgtcaagttgtcccaagatagagtcttttggaaggagggaacctcaattgaggaaatccctctagcagattgacccataggaaagcctgcagagcattttcttgattgatgattgattatgggagtgcccagctcactatgggcagtgccaaccctgagctatgatcttgggtgatataggagattgagcaagccatatgagcaagacagcagtgtttatccatggcttctgctttagtttttgctttgaattcctgccttgacttccctcagtgatggactgtgactgagagttgtaagatgaaaatactgctttcttccccatgttgcttttgtctatggtgctttatcagggcaaaagaacctagaatggactggccagtggtgatgcatgcctctaatcccagcacttgggaggcagaggcaggtagatctctgtgagtttgaggccagcctggtcctcagagtgagtttcaggacagtcaggactgttaaacagagaaattatgtctaaaaaaagaaagaaaaaggaatctaggacatcatctatctttcatctgtgatgtatctggtatgtataatctatattacctatatattttagtatcattttctctaactatgatgcatctattatcaataaagtatttatctattatctacaaaaattatatatttatgattcatttaatctatctcaattttccataatatcatatattaataacctaccacttatctatcttttagctatcaatcatctatcatttttctaacaataatctatgtatcaatcatctaatcatctgggttcattctatttatatattatttatctctttgtatcgtccacatatgatacatctgttatatatctttgatatgactatcatctgtaatttatcatctatttatcagtccatcatctatttatgctctatcttctatcatatatacttatatacaaaaatctatcttttttccaactatctttgtttatatatctgtgtatcacctataaccatcctcatctctctctctctctccttacctatcctattataattatcagtgggtctggtacattaactgaaatgtattttgagaaaattgattgaaatgttattctattgactcagatacaaggtagacttcactgtgtagcagagagtttaagagagaaaatctcaccacagatagaatggtaaatgttgagcatgggaacactgctttgtgatagccccttgttctgcatgctctcatgcctttcaggcattatggactctccctctggaactgtaagtcaaaataaactattctttttgtaatgtttttaaaatctacttaaagttgactttggctatgacattttattacagcaatcactgtaacagaaatgtaatgaatacagctagggtgtagatctggaatgtcacaagcatgctgtcagtatctgctagcctccagtggaagttttatggcatactggtatctcaaggctggaaggacatgcagaaagattatgtggcaggcagaaagcaagagagtgagcctcctgggaaagtgaaacttttttttaataacagtttgaattctggggtctaatgagctctttgagaatagcataaatcccttatgatggctgtggatcttaaacacttcctactaagcctgaactcttaaagattctaccacctcaatgctgtcatactggggatgagttttacagcacattgacctttggtagtgtgcatgcccctgatcaatttagcagtttctcaaggaaccatactaagtgccagagctaatccccaacatgcggtgaatcccacatctaccccagagaaatagcttttaaaagatagagtaagctggagttatttcagagaaaagtggaatctcctgaacagtaaattagtcagtgtttggcttggagaagacaagagttaagggaaacagagcatcagctatgtaatgaaagaatattttcaccgcttgctttcagaaggcaattggcagttaacagctaacctagaaggttagacaataagataaattacttattggtcttccctaacactaggtcttccctagcactgggggctttagactgtgatctctactacctgcattgcacagaggacattggtgtagtcatcttactatgacacagaagttggacaatgtaacccaacagaattttcaatgtttagtaatacaaattgtgccatttctaaaagttactgagcttgatggggctttatagacaggtttacattttttgttgataaaaagtaatgtctcagtagtcttatccattggttgatcacatatgacttttttcctgtggttcttgataaatcatctctgtaacatttacccaaatgattaagataagaaaggctatattgttgattgggaatcctttaatgtactaaaaataatttacaatgtttttaacctgaaatctttaatttaaacatatttcctgatatttattcagaattggtattttagccagttgtttcaaaagatttcaaatataatacaaaattatttgggtgatgtaatagggctattttttactgatattattatactaatctctgaggaataggggagtgaaaaagaagtatttgcatttcaggaaaattatagaggtggctttacatcctaggcaaacacctaaaagtttgtaggcaatccaagagacaatctccagatgaagaaaaagcaggagtcaaagttgtaagagagggcagagtcaagttttaattgtagagaactgataactttgaaagaatttcaagatgaaaactctaaaactttaatttcgaactcaaaaaagttacctttagaaaatactctttacagttttatcaatgtgcaaaatatggaagccatgatttgcatgcacccctccccccggttaatttctgaatgctattctgggtagtgggcaatcagaatctgcatgtaagtgccctatgggcagagttaacccatccatcaagaagcaatctatcaatgtagaatccagatttggctgaatgtaaacattatgtacacatcaatacacataaattttgtctagcaaacatggtaggattattttaaaaagtttaacaaggaggtcaattcatttggtgtgggcatttgtttttccacttccgatcttacagagggtttcagtgtccagaattctagttattggaggttgatagtaggctatatgctagaaaatttcggacaaaactgtcaggggaacaagggagactaataaaatggtgacatagagaagggagaaagggggttttgggttatgggtgagaatatactcagcacattatatgttttcattaaaatgaataagagtcggttgtacctttatagtattttaccattatatttgaaaaagaaaggacttttattcttattgtacaactttgactttcagtgaacccctgactactttgttggtctaaccaacaattcctctaaacagctatgactaaaaccttggatgcctcaaactcttcctctataatcttaatatgtacttagcctttcaaatacagcaaggagatcccagttcttcaaaactcacacatgttgcatgcctagcaatatgtcttggcctgaaggcagagtcaggggcattgtgccttaatattagcaaccctttaagcatggttttctctgataaaatccacttcttagcccagatagtctgctcagtttgcatagcttgcacaaaattccactggatgttttttttttttaatatactgaaagtaacatagtggctaaggagatggctcagttgctaagagcaccgtctactctcacatagctcttatgttcagttcccagtacccacatggtggctcacaaccttctgtaactctagttcacggagaatccaacagcctcttctgacttccattggtcctgcacacatgtgatgcacaggcatacatgcagacaaaacacttatacccataaactaaaataaaatcttgaatgcaatgtatacctactaaaatttgcaaggttttaatggaaaattttatttgatgctcataaatttgtttattcatctataaatatatatgaatttatatataaacatatataaatttgtttaaacataaataccaaggtaaaaattgcttcagtctactggaatttcagatttgtgttgcttcatatggatgccagtcctccacatctgttcttagttatagaagctaccatacacaacacacaattattcagaaatgaagagccaaacattcagggaaactgtctgattcatgcttatattcatggagaatggacagccatgtagaaatatagcacatcctgtatgataaaatggtagcagaattaagggtccatcttgaaggcctatctgaattcctactgacctcttgggatggttccattactgtcatatccacatatggtccttgtataatggaggtcatttttcctaagatttatatttttgtcttattttacatgtatggatgttcatggccaacaaaggcctgaagagggttaagatcccttaaaattggagttatagatagttatgaactaccttgtgggtgctaggaattgatctgagtcctcttcaagaacaatgaatcctcttaggcacctaaccacctctccagtccatagaacaaaagtagtcaagggagaaggcacaaagccatctttctggcttttttgtcttgctctaaagagagagattctgggttctcaaagatgccttgaggagggggaaaagagacaggaatataggcataagacagaaactttgcttctggggacttgccaatctcacctcaaagtaccagtatgccaagaagctatacttagtctattatgttctgagcatcaatactagaatgctttgtaaatagtatcctgtgacatgcagcttttattatagtttctttgacttagcaaaactgctcctaaaaataatcatattaatcctatgttagtgtttttcctttgtgttattgaacagtatacattctgctgtaaccatatgccatccattgtttacctagtcactggttaatagatacatggtttatttcaattttcactattatgaatcccacattaagtatttatgtatgggccttggtatgtacatacatttttatttatcttgggtaaacacccataggggtttgctgcatcacacttttctaagtgttaacttgtgagacatctaaccattttcatagtaggtgcgccatgtaaaattcccacccacaacacatgagagttagattttgttcaacattttcttaagtgcttcaagttattgttctttgattttagctgttccagaatactgtagtgctcataactaaagaacgggtatatgtcttttttgttgaagaacttccaatcaccaattttcatttgtgtgccatgtcttgtttaaatgtttttttttaaggtatacaatttttatcaaagcctttgtgttaatgtctctctctctctctctctctctctctctctctctctctctctctctgtgtgtgtgtgtgtgtgtgtgtgtgtgtgtgtcacatagatatgtggatgtgtatgcatcagatggtcttttccagttagtgacttgatttttaatcttctcaaatgagtcttttaaagaaaggaagtcacagtttggattaaggtcaacttatcaaatagtcattttatattctatataatgacttaaggagttatctaaaatttcaatgattgttttctttgtctatgtttctcttataggctttgaaaatttgactctccaattttgggttatgatatgttttttttaatatggaggtaaataagtatatttgtggttgttgttctaaatacctaaataccaactgttgaacagagagcactttgaccattgcattactttgtcactattgctgaatgctcagtgatctactcctgtactcagttccatcattgctgtgtccattgtcttttacaccagaatgctactttcttgatgctatcattttgcagcaactcctagaaacagatggtatgaaaactctaatcatgttattcctttcctaattggttaggttcctttaaattctttgtattattccataaggtttacaatcacagtgggtttagatggctaagcagcctaaagtgttgtgtcaatcgccagctgagtctggtaatactttctgctgcgtagtcattgtgccatccctagtaagatggtaaagtaggagagattcttatcataggaagtaaattactgtagcagtttatccttcttgggtataaggaaatacctatggtttttcaaactttctagattcttggaatgaaagcacctatggcttttgtgcagaaaatagcagtggggacttcaaggtgcctattttataaggactaatagcaggcttgaaaatattcagacactttgattcctttctatatgggaatgataaaaaggttgtttctgatttgaataaagtctaatcttattacaagtcctttggctctttcttcaaaaataggggcaagtcttcataccaggcaatacgtatgcatttcatacaagggaggaaggagtttcctgaccttggagtctgagttctttgttcttacagaagatgtgactgtcctactaactaatgaaaggaagcacatacttccattctgcaatctttatgtaggctgatataaattaatcacttcttaagataacttcacaaattagaagtgagacaaatttcaatgcatattttatctatgtcaatacatgcaatcacaaatttatcaaatatttagtctagcgggctaaactgatagaaagaaatgtctgaaataaaaacaatgtttataccccataaaaattcactaaactagacctatttgtatctgatttgaattatttttttaaattgattctttcggattttcacattatgtgagcaaatcccactcatctcccaggcctcccatagctggcttcagacttgtagtgcccccacaaagggaagttaaaaaagaataaaaaggagataaaaataaacacttaaaaaaagaaaaaaacacttcactcctctgtcattccctcctctccatcacctctttattcatcttagcagcattgggagctgctgtgtatcatgcagtatactcttttatccaaatagctttatttgcaaatgttcattgtgtaatgagttgttggtctggcttaatacctctggctttgttacatcatcaaaactggaccccccacagtcattcctcctgatctcctgttgtctccctgagtcatgaaggtcctgtagctacagttctgtaggatcagacctttcacacactccagaaggtcatagatggggtagatgttggggaatgacctggatgtgtatctgggtgacagctgagttggtcagtctagaccactgggaccaatcctctcaggtgaggggcagaggctgctctctgagatccatggtgagggttggggagagctttcccaagtgtgtgtgggtgccaactttcctattaggggcaggaccaggtttcctgtgctagggtctgcaacatgactaatgaatgaccgaggggcagatactggggttcaagcttcaagctgaagatgggagaagcaaagcagccaaccaccagatcttacatctacctcacactgaaggggtgatctgactagctccatgaatcctcagactgcaatcctagactgctgcctctcctcaacatggttggagactaaatctttaagcctgactttgcttcttttttttatacctctcaaatgctagaactaaaggtgtgtaatctgagatcaccttcatgtgaactgtttctctttaggactagatcaattttgtgtagctccatgtggccttgaactaacagagatccatctgcttgtctattgaatcctgggtatgtccaattaggacagcatactgtcagcagtcgaggcaagggaagtttcttgcctaaatggctagttttgccacattgaaagcaaactccataaggaggttctttgctgcccatcatccttttttgaagctaattggtgctgtgaacaccagacatgtctcactgtcataaaaagccttgtgttattaaaacattttaattgccatattatgtgggtcttttatgtgtttgaagaccatctatttaaaatatatctgtttgacctttaaaacataactaacatagatataagtttgattgttatagattattaactattaatgtaattttctttattattataaattgatttcaaggactaaaactttacattacatttttaaatgaactgcacaggtataatgtgttaaacaagaacagaaaaaacctataaatggtataacaaaagcaaccttaaatttgtatcaatatacaaaaatatataccaatgtaaaatatttgagactagtagttgttttctagttcaaaagtagactcaacaattcacccttttattccatcatttctatactatctcccctcttttttccttcagaaaaagatctccaaatctaatctcctttcttcagcttttttcctgaccatgatcaataataacttgtaaccaaccaccctaaacaatgacaaacatccataatccccagaatgaccaaaaaacatccaccctaactcttgggactatgggtgtcatgttctcttcctattgtctgggatgatggatctttaggagaaactgagaaaatatggataatggtcaaatcctgggagagctagatttattattttttgtttcatctctgtgtgatggggaagtatagagcttatctgaagttgtagctggatagtctgtaaggctggacaatctcaactagtagatttgaagttgttctgggaacagaattttgcggaaattctaacagagtcattctgagaggctcaatcacctggcctacttgtcttcattgctgttttgccctttttttgtgaaaacacacgaaactttaaaggtagcacatggatctgcattaacaaaagtatggaatatgtggtatgcacaacttatttaaagaatttttggtttatgtttgagcagataaaaggcatctgttaactttgtatgtttggactgtaaaatcaaacctctcatgccatatgaaaagatggcatataataataagtcatgaggactctgtagccaacaagactcttcatgtctcatccaggctcagaactgttcccattcagaggaatcaacatatatatcacatgtcctgtagtcttccttggtttctttttcatgtctgtaaccaagattttcaggaggtctcccccaatcaaatctgatcttcattaagtttgaagacaaccataacttcttgtttccaatggaaacaaaaacataacctctcccccaatgcacatgttttttgactttcattttgaagttgacttgttttaaatatataggttgatttaatttagcagttttcgtaatcctatgtcactcaacagctattcttttttgtacattagcatttaaaaaattcaaagtcaccaaaaaatttatacaagatccacatatactatgtatttatctttatgtggcttattctttttatattatttgggggtctggtggatgttgagggtctatgtctttctggggttgtgttggatctgagggctcccctgcagccagggatgatgccaacttgagtgtcctgatgccaaccaggagccatgatggcactcaagcccaggctgcttgagaggaccatgtctgggttcatggtcctacataagtaagggtctgtaacaatgtccatggcccataaaaccaccaagggtcacatagatgcctgggttctgagtcaccaccagtgaccatgatgtcaaccaggcctgggctgctacctggggccatgactgggtctatgtgcctgcctactgtagccaggttctgcatcaatgtcaatggctcctattcacactaaaggcagtgtcaatacttggagtatgggccaacatctgaggccatgttggtgttcaatggtcactctgtcactagggatatatagatcagggtggactgcactgccacctaaggcaatggatcagtcccagcacaggatgtagccaaagaccatgttggggtacatggccataccacagcttgggattgtgttgatgtcactggctccttttaccattaaaggcaatatagaaacccagagtctggactgaaatctgaggccaagtttgtgtccagacatatgacctctgtatccatgtagatgtaaatagcctattcagcaatccagggcacctgggcctgagattgctctttatttcatgtttaataaggtaatagtatatccttcttgggcctttgatggggttaaagactagatagtttatggttacagttcttcttgttaccaaattcagaaaagaaactcacaaagagatataaaatatataaaggtaagagatataaaagcttaatttatttatctaagaaaatgttttaaggtctaaaaagataggtttaggttggtaatacaagttagaataaaaagtaaattaggtacaaaattatagactcaccaaaataggatagataatagaatattttcaccaactttatcaaatataaatggactggacattgtaaatgtaattcttgccaatattgttcttattgtatgtagttttattatgttagagttaaaacttttccttaatatttagacaaaatggtggaaatgttgtgggatatttgtacactatgtgaatatatattattgtgattgttttaataaagagctggtggctcaatagctagggaggaggtatagaagggacttctgggaagagagaggaagtaggagatgaattgagggatatgagagataccagcaagatgcagaccaagtcagatcaagaaaactggtaagtttttttttctctagctttctcaacatattggaagtttaggacatgttcccaggcaaaatcctttctctttcttcgctatggtttacagactttatccatttaggagaatctttagtttctttgactacacacacacacacacacacacacacacacacacacacacacagccacacacaccagtaagcatgagaactttaaaaatcagtggaaagtgaagagacatagaaaaatgaacagaaaggagaagaaattcaatctaaatatgttccttattgtgtctgtccttttaagtctttatcctgcttagaaatgtaggtacctatcaaaagatatagggaagaagaaaaacttgtccttgttgactgcctatttgaatttctttctcttctctcaaagcctgctgttcttggtgtgctgattctgagtcagtgccttactgagcatttactgagtattcagtcatgcacttgttaaatatgtactgggtacctaaggtactctgtgccaggtgaagctctaatagtgagtgaaacatctgtagtctggggctggagagatagctcagtggttaagagtaccagcttctcttgtagacctgggttatattcccagcacccacattgtggctaacaactatttgtaactccagttcccagggatctgatgcctctctatggtctctgtggacactgcaggcatgcagtgtagaggtatacatggagaccacacacccataaacacaaaataaaaataaatataaaataataataataataataatggtgatgatgatgatgatgatgatgatgatgatgatgatgatgatgatacagctgctgtctttctatcaaggaccttatatggacctggaggaatgtagtacctccccacgggtacacccgtatacagaacatgaggagttctcagtgccaggaggaactatgaagccaaacaatgaagctcaggaatggcactgctgacataggttgttgtttcacagtgggttttcagagaagtcttcactggtaaagtgacatcaaggtgaagcaagaaccagtaaaggagtgagccacaaatctatatgtgtgaagtatattccagttaaaggaagtggcaagcttgaagttcaagccaagtagatacttactgtgtacaaagactaaaaaagggccgggtatatctggagtccagtgaaaagaaggaagaatgaaagaagaatcaaggaagccaaaatacagagaagactgaaaaccactctgaaaatttcctctttaactgtgtgaaagggaatccactggagagttttaagaagaggaatgagactttcacataatttaaacagctcaccagagctgtattgtgaagactggattgtgggcttgggctgtcagatagtaatagtgcagtttaacaaatggcagccttgtattctttggcccaactgtgagactatgtgactaatattgtccaatgcactgaagagaataagaacagattggggaatgtaattcctgtactaagaaactctcacttaaagtcaatgcagcaactaacaataatccagacagtgcctgctttattgtctgtaatgaagacagagtgagcagagcccctggccaacatgatacacacataaaatgttaatgagaaataaaccacactgttttaagccctgagattttaaggtggtacttcaaaataggaagaactatattaaaatacatgtacactttctccccacccccaacacacatatcacctcaatggctgtatgcagacagaaggtatacaagatgataaccagttttacaatgacaaattattcaacaaaatctttggtaatacagaaaacgggccaaatatctgacgtgttgtgagatatttgtacactgtgtgaagatatgttgctgtgattggtttaataaagagctgaacagaaaatagctaggcaggagaaataggcaggagttccaggcagatagagaggaagtaggagatgaatcaaggcacacaaaagaggccagaaaacatggagaggtgcaaaatgaaagagaggtaatgccatgtgatagaacatagattaagatgaaaaggttattttaagttataagagctagttaggactaagcctaagctgtaggccaggatttcataattaataaaaagtctctgtgttattatttgggagctggctgatgggacagaaaaagacttgttatactaatggatgtatagtaccagggaaagaaattggaaaacttgatgctaacagtgtgtggatagacggtggccacatttcctgaaccattacacagggatgagctcagaaaataacgtcttggtctgcaaacaggaatgcaaatatttagaaaatattcacaaattgagaattcttagaattgaactgacctctccacaaacaacaaatagtaaactgcaagacagacttgaggtgcaaaaaaaaaaaaaagaatcatattcagattaagagtctagccatttcactcaccatttgagcctccatttagaccaacaacttagggaaagtaaaaagacctagagtgcagacttacctgcagataggtaaaaagctgaggagatttagagatggtctactgtcacaaagctatggtcataggctaaaatatccaagtccacagatgattcagaacacacatgagcccccaacctcctgtaaatgggcaactggtggttggacttgcttggttgctgggcatcatgatgtcagttgcaagtatagaaaaggagggaattagagcatgcagtgccttctgcagggtggccacaaagacactagacaaatctgctttcaggtttcagttcaaataatctatgaaagtgcctaagaagcagtcactgctaatattatcagtacattttctcttcttccttttccttgtcctccctcctctttaaagaataattcattttcattgataaaaatcatgtataattataatatgcaagagtctgttttgtaatatttatgtattttataatgtctaaatctggctaattaatactcaccacatttcatatactcatagtgcttttgttctgcatgtccatcataatttaaaatctctcttggcaactttaaattatacaatacatttttaaaatcatattcaccaagctgtataattattcctcatcattttgttgttgttgttctccattgggccagtatttggttgtaaagtgaaatgtgcttgactggaaatgatgcccttcagggtttgctacccttctatttcttcatttcaaggaagatgcagagaatcgctgaggattcagccagtaagtcattattaacagtttattaacatttttctgacccagttgttctccccaccaaacattagtcacacattaggtgaattacataaaagcttacaagcaggaatgaaaaggatcaatcaatcaatcaatcaatcaatcaatcaatcaaattctacagaaaatatactgttgagtgagctcacatgcctctctgtccctttgatttttgtgacttctgacttctgaatgccgggtttttaagttttgcgtgtttgaccctacttatattggtgccacccattgttgtgaataagtagtcttctctgtgaatagagctgcatgggtattgaaagatttttagcaactgcctaatccctaacttttgataaactacttggaagaaatcaagcaaacgagccaaatgaaccttgtttcttttggattaagtttcaaagtttttttttttctcattaagcaaaatatatcacaagcaagcaagcaaatcccattagtttttaccatattgtcacttctgctttgggtaacatctgcttgctgactttattatgaatttgaatatcaactaaatagtaatcagatatcaaggtggttccccatcctcttgtcagtttcatattattaacaattatcgcatttctccaaacttatttgctctgagttaggagaacgatgattgttctttcctgctaggctgctgttgccatttgcctctgtgatttgattctatgtgtataatgctgtcatagctacagccccaattgaatcaccaaaactccccagattccttattttacctaagtccttcaaagcatagcctttcttgttcatacatatttcatcaccaacattttatttactttgcttcccagagactcctcatttctgccaacatttattgagcacttactatgcacgagggatgtgtgctgcaaactggaggcattcagagatgagacagataggatcaagaattagaagaagcttcagtcagggaagccaaaggtgcctgtgtgacagcacagagatttctgtaatatgctttgatatggatgcagagagagtagaaagagttgaatgtatctagagcattgttggcacgctgacatttgagacattctaaatctgcagtctgtgaagcaaagacactattcagaattgagatctccccatttacatgcttatttacatacaggcagccctgagttttatgtctccagagccataaaccataaatggaaattacttagaaaaacaattgcttctgtaccaaatatgtacagacatcttttttcttctccttattccttgaacaatactatgtagcaattacctatgtgcctttacattttattaggacctataaataatctggggataacttaaagatacaaaggttatatagcttaacaattttggcttcccaacagtatatggagggcatcattattcttataggtaaaatgattgcaaaatttaattttgtaatatgtagcctatggccaatctatgatttgatttgaacacaatgtcttcacagaaggcccaatagccctataatagatgccacactgagtaagtgaactttcataagagcagtaggtgaggacattttgcttccttagtccatctgtccactgtgcttatgcctcagagctcaatactgttgtggtacacagtgcccaggagctccactcacaggtccagtgagaacctggctccttgggcccagatgtttcgtgacccatctacactcagagtatgcccgatacattataaatcatttaacagtacatatttcaattctccagagcatgttcatgggaattaagatgtatttctataacctttttaaccttcacgtcataaacatttaaaatggttgtctacatttttcataaaggtgtgttatgactgagtgtgtgcattttagttagaaggcacagcctctccatgcaagacaaagaatatacataactcatttcatgtgatgataaatttagtcacaatgttccatactatgtatttaaataaattctgaagctgcctgaaatggaggtgaaagatggtttctcactcctgcttgctttgtgtgggttggacttctcttcagaatgaggaaatctatgtgctcctgaagaaatgcctgattcattgtcttctctcacagtttatgtggtacctgcaaacttcaaagtgtataattatgctttgggagggactagatgtgtgcctgctcccagctgggaggactctaccacacaccaaagctacagtaactctacaccataagattcagttttgcgtctatgaccattcaagattggttgtcactgttgctttctgttggactcagacccactcagcctcagtggagagaggtagagtgtcaacagaaggggtttaggccttcaaaaaaaagattcagctttgcactcagacttaaaacaatttcagaatccttgatgttttttctactttgatgttgtgtgttcacaaattcagtttgtaataaaaacttataactgtacttcacaatcaggataaagttgagtagtccaaggctttgaatatggccatcgcttcattatatggtataaatctctctccacttcattatatggtataaataatgagttatctgcagagagcagaatggtcagcctgatagtaaaagaagtgagatccatgataataaaatttagacaacctagtttctatcataactccatgatgaagtgggtgcccgaaaatgatcaatagtataaaagtttcttaattgaaatcaagaaaagtatacattatgagtatttttttatatccttgttcatagaactgaaatgtattaactcttgagaatgggctgaggaatatcatgtaacaagtagagcagactggatggaattaagataaggcttgtgttgtcaggtctttgtaaatttccctttctctaagtcagacttggtgtcatatggaatgtgacaaaaagttattgtgggtaaattgtgttgctgaaaatagatattttctcttattttttcccttttttaattgtgtgtgtgtgtgtgtgtgtgtgtgtgtgtgtgtgtgtgtgtgtgtgtgtgtagatctcaatgggaaggaccctgtattggagaagtatgcactctgactccctgaatcatctctctagaaatatatctcctcttcaatgcccctttgactttgaattccttcttgttggttctcacttgctttagattttgacagtagtattgttgtcttaccctgggcacagcctgctatcgaaagacaattcctagcacttgcatttaagtacagtcgggtgactagttcttgtcaaaggaatgagagtagagtgagttgccctgctgtgggaccaagtgatattgacatttctgaagcttccttttgcaagctgggaggagagttttctggattagacttgacacctttaagtagagatatcttggtagatatataaaagaaaaagaaataaattcctactgtattagcctctcaatttgttggttttgatccaggtatttttgttttctgtgtacataacataatcacatgcatcctcctgagaggaagagatacagagatttggtggcaggaatgagaatcatgagagggagccaggagaaacacagctagagaggcatttttgtctcactggccttgtacatggggaaggggtcaagggccgagagttatgaggacagttctagacactgggaaaggcaagacaataaattgtctctgaagcctacaacagagcatgacctctcttgattttttagatctataaaattcattttgggattctagccttaggacatataagaaactgtgtttgccttaaggcactgggtttgtggtaatttgctacagcagccacaggcaactaattcatttctcacagttcccatgtactctttagctctttgcagtcagctttgctaccatactggaggcactatggtatcactttttttattcattttctccttttattttgttgtattaaaaaaattattagttcagtttagaaacaagcctccttcacatgtcaatcccagctccctcttcctcccctcctcccctgccctccatcaaccctccaccccatccccccttgctccccagggagagtaaggccctccatcagggatcccccaaatctgtcatattatccaggtttgggctgaggctctctgccatgtgtccaggctgagagagcatccctccaaatggtatgggctcccaaagtcctttcgtaagccagggataaatactgatctactactagaggctccatagagttccgaggccacctcactgacatcactatgctatcactttatctgtaattccatgtaataaaagcatatagcacagaaccatgtgtgttctgtgctttaatggaacacagactatcgctgaaatctatctctgaataccagcagttgttgtgtgcatggctaagtagacttctgtttggatagcctgagatgtacctagtgctctgcctacggggtttttgggttgatcccagttttatgctatcactactaaaggatttttgaactcctatgcaaatatcctttcattgacccgttaagagtttaatctcccggttttgtagtaagtaagtgttaaactgttttgtttgtttatttttcaaaataaggtcttgttgtatagcctaggctagacctacaaagcattattctgcttcagtctccagggtaactgggattgttcctgtaccaccacacttgtttaatcttttaacagactgacaaattgctttctaatgtggttgagtaatttaacctagggacaatacatagattttctaactagtttagagataagaaaacagagagaagtgggaacaaacgagggagcagggaaagtgtagaaattaaataaaataaaagacaatgatgttgggaattaagggttttctgacttaggaatgacctctgtaggccagagaagcaaattcctgaaaaatttgtggatgcagggaagccaagtgtacaaacccattaatgcctgtcaaccaaaacatttgaactcagcttttagtcaagccacagagtggcggaatgaacttcctccttctgtgctgtgaatgcagaatgagggggttgtccagtgacaaagtttgggttcccagttctgtggccacacaggaaaaggattggtatgttttaaagctcatatgacactcacaggaccatgacatcctgctagaacctcaggcctaatactaaaatgtaaagactttctttcataggctgtggctgcagtattgccttcgttagcaaccaacatgctacaaaaaaaaaaaatgctctcctaaggaaaagggttgggtaatttggtgtttctgctgtgatgatgtattacaccgttgaaaggtatggaacagaaacagaccagctatttttgaagaactatcaaaatatataaattgtactagttgttttttttttttcatatgtaacttgacacaaatctagacatatgtgagttgaaggaaccaccattgaaaagtgccttcataaagttggcttgtgggcctgagagcattttattaattagttgtaatgataaaactttctgccgaagtcgcctggccctgccgccatgcgggtgctttccgctaagtcacctgagttatgttgctgcattagggccccaaataacatggatagacttatgttagttacaaagctgctgaccaattgactagggttttttacttgctagctcagtcttaattatcaaccataaagacttatcttatcagacacgagctgcaggcgtcttctcttgctgatatcacatgccaacttcatagagaagagaacaggaggaagagaggagcaagagaaaaaggaccacttcctgtttgtccctgcttatatatgagtctgcctgctatgtcactttctacctgtatcacaagacttctttttactacatttcccagaatcctcctcaactcctagtcccacctaacttgctgcctcattggccaaacagtactttattcaacaatcaataagataaacatacacagaaggatattccccatcaatatccacaaaactgcccagccacttgtgaacagtgctccccctgggcatgtggttctgggttgctaagcaagccagtatgaaatattcttccatggcttttctttttgtatgtatctccaggttcctgtattgagttcctgccttgacttcctgtgaagatggaaggtgacctggaagttacaaaaagaagtaaaccatctccctaaattgttttggtcatggtatttcattacagcaataaataccctgatacagaactggtaaaaggttagaaagaaaaaaagaaagaaaggaaagaaggtttgcctaaaattgtctctattttgttgaaaaatgtataatatttttgtatgctttaaaatacttaatttttggtaaagagaagaagaatagaagaagatgacattttctaagaattcaggtttctgctgcatttctggatatttcctctcatttgctgagtgtgatcagctaagccgtgctgactcccagtcttcatctcttgccttgacccttcctcttcctcttcctttattcaagcctgtgatatatgccatctacctaacccctcaactgaaggctttggggaactgtaaacttgactgtttcaactgtttctttcctcactttattcctcctcccctgctttgtctcattgagtcatagtcatcttgctgctgaatgtagaattgcctgtgtcagagttcttaccactcccctgcttcacagccatattcaatcgagtactgatccagatagcctgacttgtgagatatcttataaagtcactatgtttctgtctttcatttcagactcctgtgatctcttgccttcatctttccacacattcttgataaatcttttggcctctgaatgtccaccttcataaggaatacataaatgttctatggtgactggttataaagggctggttattggttcagtagtagtgttttcttctaatgcatacatccttaggtttgctttacagcactgcaaatagcaaaaatttgtccaagacttcactggctttcttcaggatccccaggttagtggataagcctactaatgcatttactgcctgacctatgtttggaaatcatgtctgaaaataataaacattacaacaaaaacaacccccaaaaattcctctccagaataagtcttggactaagcaatcaccaggattattgctgtgagtatttttaaaaagaacaacagtacttcaccctacacaaaactcagaataaaatctatagtctggaatccctttatgatatatcagggaagaataaaactttcaaatgcaagaagcagaaaaaaaaacttttaaaactaaaaacactgaaaagcataatgaattagtaaaactgaacatagcagttaatgtttaggatatatgaagttaataaataattgaaaaattaataaaagtgctcgactgccttgaaggtttactcaagggaaaaggtgagaaaacaaaagtatattatagtgagatgacagagtcgcatgtgggaaatgcatcaacacctttgtaagtagacagttgataaatcttttatcagcaacagcaattttggtagaatgaagaaatttaagtggaaaaggggtgaacaagatatagacacaaaagggctggaaaattttgtgttaaatgactcaaatatatcacaactcatataattatatagattgaattttcttcctcctccataaaaacaaaaaaataattttattaagaaaacaatggtctgattctgaattcagtttgcaaagcaagcaaaccttgttactcaaatcagatgacaagcaaaaagaccagttctctaacatgcatcaaaatcctaagatttagtgcactgatttgggtgaccaaagagaacctaattttgtcattaaactcaacacagtaacaggttaaaataaaaatactttaagaactcccttaaaataatgtctttttgtaaaatttagctatttctcataagatcttagagaaacaagagaaagaaaagaatacttctcaatattcagtgttggtaatatcatattttataatgaaacaccaaaggtattcattcgattttaaagctgtaaagatgatgagaatagtatcattgctatcagctgtggaagttttgctctagtaacttgaaactattaaaaaaacaaacaaacaaacaaaaacagatttgaggggctaaagaggtggctcagaagttaggagcctgcctgttctccagaggactggggttcaattctcagcaccctcatggtagttcacaaccatgtaacttcagttctggggaatcttaattcctttcccagcacacatgtggtacacaagcatacatgcaggcaaaacacaggtgcacataaacttttttccaaaaataatatattatattggagaggagaaataaattactgtgtgaattgtctgaacacagtgattgccaatcagaaaacaaacaaaccaagaaaatcaaccgaaaagcatcagaattaacagaataattcaaaatctagagtttagttttagatctaaagtttatttggatcctaaagcaatggttctcaatctgcatatcagatatttacattaagactcataacattacagttatgaggtaaaattacagttatgaagcatctatgaaagaattttatggttggggtttaccacagcatgaggaaatgtattaatgggtcacagcattaggaaggttaagaaccactgtttaaaataacagtcttcaactgacattcagctatattactgatcagtgaacatcttttgggaatcacactgccatgattgggatacagctgttctgtggaatgaggtgtgtgtgggtactgcacaagagagtaagtttgaactaggagaagcaaggtgcagattttaatttcagagacatctatcaaattataatgaaagtgaattcatcatatagtgatacagagtcccatgggcaggagatactagttgggagttgttaagaggtagacaatattataatattcagaattaattaaattgccttgggagctagaaaaactaatgcaaacagatttcagagtttacagggtgatgaatctgactaggaacctgaagggaacactgggaggctgtttagagggggaccaggagtcaatgctgctcttgaaaccaaataaaatgtctctaaaaaacaagggagttgtctactaatggcacctgctgcctgccagtcaaacaaaatgaggagagaaaacctgccactgaacttcgcagggaagaagggcatgcttgttcatctctgtgatgagatcactttgggataaatgatataaacagaggagagtcaaagtgtggaaaagggagagtttaaaatagcacaaaaattctcgaaagattcctttaaagacaaataaataggtaaggtgatggggtcacagtgaaatccagccttcttggggatgggatcacctggaccacagaaagaagagcaataattggagattagccttggtgattatgacatgaaagggagcattcctgctatgaatcaagcccagcactgatacccatgacagataaccaagggaaagtctctaagaaggtcatcacataagagacaccaacttcaacaggtgaacagatctcaacatagaaaacactgatatttcaatgaataaagtcaggcagcacaggatctgaaagagaactggacagaaatcatcaagaaaatggagagttctaatggtcagatggaaaaacaagtggttgacagcctcagtatcagatcagctggataaaacaaaaataatggaacctaaagacaggtaattgaaatgttattggcagacagaaagaacagaaagagaaataagtagcattcaaaggcattagactaatggaagatttctaagaaggaactctcaatgcagggtgtgggggggggtgggtatgtattctatgtcctgaaagaaaactattaccaaccaagataaaatttgtaaaacccttctgtaataaggataaatctcagaattcatgagaactaaagcagaattataaaagatacttaaggaaatcctataccaagaagagaaagaattgagtaaatgttgccattaagaattataatttggtctctctgctcatcacttctcccacacctcccaggatgatatgacagactttggggaatcccccatggagggtcttacccttcctggggagcagaggggatatagggcagggtgttagtggtgatgggggaggaggggagggagagggagagggagcagggattgacatgtgaagcaggcttgtttctgatctgaactaatgaaaaaataatagaaaacaaaacaaaaagaaaccgtcatgttaaatttaaaaaagaattaaaatttggggctagagaaataggtcagtggttgagaacactagccagtcttccagaggtcctgagttcaattcccagcaatcacattatggctcacagccatcagtaatgagagggggtggaggggggagggagagaataagtgacccaagccaatcccctcctgtgtgaatcagcagcagcatctgcatagtaccttccacaactgagagctagccatcagggaggaagcttcctggtcagtaccaacttgattttccattgtccaatgaccaatgtaggtagtgacatcaataataaggtcttaccattgagttctggtaggcaaccaggagcaatgacagaagccagcattgtatggggcagggatcctctggtacagatctgaccaaaatcttaaggaaaagtatcctgtacctcatactgggatttttggtaacatacagattttagaaggagtacaatcttcccctgtgtagaataactccaattaaactcttctatgtaaatacatgcatgtacatgcgtgcgcatgccacacacacacacacacacacacacacacttggaattagttatccctgacaatcctctcctttgccctgccctcccatccttctcctcacttacatatcccttctcattgtttctccttcctacttcctgtgttaaactttgagtttaataatgtaaataagcagactttatattgtcaaatttttaaatatagtttcaagaatctctccaaaggccatggcacatttcattgtggaagtagtctggggcatgtgttgtgggcattctgtactgtgctcagtcctctctcccagataaacacgtgtctgtttcaacattgctaaggacacacctgcttaaatgttgcttcctcaaacatcttgtccctccgtgagtttttattctccttgtcttcattatcttgtcatagaatctgtgactgtcatatctgtttgtgtgtgcgtgcacactcgtgtgtgtgtgtgtgtgtgtgtgtgtgtgtgtgtgtgtgtgtgtgtgagagagagagagagagagagagagagagagagagagagagagagagagactttttcttatatatcttttcccctaagggagtactccttttgaagaaagcatgctgaggacatggttgaaaattcaaggcaccttgatagcatcaatatatatatatatatatatatatatatatatatatattcagttctgttactgtaaagaaccctgtccaatacagagccccaccactgacaagattgtcttattttggtacatatgtgcttcaatagacagtaaacatttgggctaatactcattggatagtttaataagttaatgctatattaataaaacacggtaaaggtgaatcctacttatgtttatgactatgcttttaaattggtatttgtgctattactttaaaaaaaaacaagatttccacataggactgcacatgcctagtttttaaaaatgcaatttaggtactaaaaacatgagcatctcctcctagcatccaacaagagagttgaggagcatgaaattagctttataatgagctgattataaagtaacactagtttagactgagcaaccatcttaccatctaggagattgcacaaaactcaggagaaaaccattattttatagaaacaactgtattgcccatttaatacaataaaattataaaagtggtgacataatagaaaaacgcttagacgtaattacaatgtccaggtgaattttgcatatgtatcaatgctctgctaaaagaaatcagttgtgattgctagcgggtgtttatagccatgttttattattaatagcatgtgaagaaccaaaagactgctattcaacaaatgccatacagaaaagtctttagacagctacagagaggtaaaggccagcttctaagtctaatataattagagtgctggagttgcactgcagcatggaaaataggcaaattttaaattcttgaacaggcagtgtggagggtcagcagtggtgcattgctttattgaaaccaggaaatcaaccattgtacagctccttcaagaatccattcagcatcagagtgtttcgcatagtctcaaaaccccaagcattgaaggtgagtcaataagttgatgcaaaacttttccttcctcaataatgtgaatatgagaaggatgaaatctacaaccaaattgaagttttgaagttttcaattaccttatgaacatttgaaaggtgatggtcttattgaaataattattacttaattagcactgaggatacatccataaatcctgaatttccaacaaatccctggaccatgggacttgtctctatttctccagtggcaaatgcctatttgtccttccacacctgcagcactgaccatgctttccaaggtaaagctgggggcaagacctgcacagaccctaaagactatatgggagctacttatagaaacaatgcttggtacttcaagacacaaactagtttcagtgagtggaaatgtgagatagcaaacttgataaataaaggaactaatatagcccaaatcctgtgtctatatacttctgtttaaaggagttggaagaagggtctgaagaacaaaagccacatgaagtgtagagaacggctgtcttttgtgtatattctcaactctttgatgtccatgtagggtagagtaaggtcctataatgctaaataactgacacactatctgacaagtctaggacttgcctttagaaatgcttgctctcctcattgtccttgctgcttagtcaatactagccatgctaatgggagaaagtcatatatattggttaatctgttgttgtagcatgagtaatataaacacagagacagatattggggttcaagctgaatatcagagaagcaaagcagccagccaatagctcttccctctaccaaggttgaaatgcatatcccgtcttcgctgtgactggaaactaaatctctcatgagaccctttgcttcttccttatagacctctctaatgctgggattagaggcatgagctctgttactcttttggactgattcactctcatgtagcccagatcccttggcctctgtgttattcttttgggattaaactatatgtgccaacacttcctgacctctatagctagatagtgtggaagctttgcattctgatccccagacaagatttattaaatcataaataatatatcactacatgttgttgtataatgattattctggattatttctacttcaagttctcagttccctgatatcaccaaaatatgtgtaaatgaaagataactaatgttataaaccagatcatacattatcaaaactttaaaagtcctgcttttaaaattttttgttcaggtttcaaaagaaaggaacaaataagcgagggaactaaaatctgagggaaaaaagaattgactcacacacaattgatcctctttatgttctttctttcctcctcctcctcctcctcctcctcctcctcctccttctttctctcttgttgttctgtttctgtctatctctgcatttttttgctcttgaattcttgtcttcattttctctctaacacttttctgtttctttgtctctctatttcttgtcttcccccagttcttgggggtacaggtatacatacagtaattatttttgcaacagtaattatttttacaatacaatatgaagcttgtgtttctcaggatcagcaaggcagataatatttacatacagagcaataaactaaaactgctaggagaaacttttagcatcagttacttaaggctgtaggtcaaagagagggtctaaatttgatttgtgcaagaaacaaaacctggcgccttccagtgctccagcctcagtggcagcacaggccttcaggaaagtttatcccaccccaccccacacccccacccccacccacccccaccccccatccccaacccccaccccgaggatgagcaaatgggccaattacctttgtctttatcttctcagtggagaccaggagggaacagtaaatatctgagctaaaatcttgagtaaaaacaacaagaagtttgagaatcttttagtgcagggttagtttaggttatcactttctctatctgccagtgagataaagccaagggcatgcttatattttctatccatctaagcagcttcgaatcaacaactttggacatgtagtaattctatgtccttggatatttgggaatgtcttagatggaatgcttttgcctgagccctaaacactgaccaaatgcctgttaataaaggtgattgcaggaaggcagatctctgcaattacaatggagaggggaacaaggacctgatagtgggaaacaggcctcacacatagctgaggaatataatcagtaaactaggacctgctaatggagaacaggtatttatacatagctagggaatgcaatcagtataactccaaatgaatgagagaaatctgttcccagtaaatgataagatggtgctgaactgtgagaagtaaatcccgagtttgttacagaaaggaataagctacaggaagaatctacagcaagacacagccaattcatttacaacattgtaacaccaggtacagctttgtactggtttcatccaacagaagaatccttaattgttctaagttatttgtgatgcaaaggctgtataattactgtgtgatcattcggcttgtagcaatacatgccagtaactcatattatataccagatcacatatgcaaatagatctctgacccaccaatgctcaagcaaccaacccatacggctaaacatcagtctgtaacagagaatgatggtcataatttagctattcaaattctgcactgctcccactctaattctcccactcagcagttgattataacattcataaaatagcaaatacattctaacaaccaatcacatatattctcaagtttcttgttaactcgtctcttttttatcccagcaacacctaaataccccttctaattacccttctatctacccctctagccacctccactaaccaaccccagccttttttaccatataattatctattgtgccctattttgagtctttgccaagtgcaaataagaactcagaaaactgtgaataaagaaattacttttgccttcacttggtcagtcttcctttatttctatagtgttcttggatattccattgctatgagacttgaagtactcatgtcatggttcctaggctttgaccactaaagtatacatggaagactctggcatgctgatctgtgggggttctttttcaccctgtgcctgttggccgccaggttgagaggagaaagaagcagaaggggcaacagaaacctttgtatgaggcccataagcttgaatgaagacagttctctcagggacagattttggtgaatcagctcaatcttattccagagtataaagaatatatagaactggggagacattggactgttacgataaatctttccaccaaaagctgcccgagccctactgccatgtggccggtctccaccagccgcccgagttctgcccatcgtgtggatgaacaaaataatacagagacatattaggtacaaagctgcttggccaatggctaggattctcatctgttagctcagtcttaattatcataaatctatatattttataagacctatcttatagaggatgcctttcactggcgccttctcttgccagtggctcacaccccactgctggaggatgcgaaggggataaggggacatttcctgtttctccttaattaaatatgagtctccttgctatgtcaattcctgcccagatcaccacttctctactacatttcccagaatcctctttgactcctagtcctgtctaacttgctgtctcattggccaaacagaactttatttaacaatcaataagataaacatacaaaatacattccccatcattggacaaaccctaatttgcattatgtggcacactcctatcacaaggcttagtgtggggcaatagatttatatagcagaaccccagcacatgtcttcttggaagggatctgtgccaatggttaaattaaagatgaataaggcatctggtttagagacaaggaaattctccagataaggccaggtaaaggcatgaagttctgctggagggagaaactccatgttgtcaaccttattgagatatgctgttaggccatgggaaggctatgacctctgaccagagagcaatgtcttccaacactgatctcagtgagtgtaaactatgctttgatggggaatgtactctgtatgtttatcttattgattattaaataaaatactgtttggccaatgagacaggaagttagacagactaggagtcaaagaggattctgggaaatgtagtagagaaatgctgatccagacaggaagtgacatagcaaggagactcatatttaagtgaaggagaaacaggaagggccctcttttttcccattcctcctccagcggcaggatgtaagccaccggcaaggagggacgccaataaggcgtctgataagatatgtcttataaaatatatagatttatgataattaagactgagctaacagataaggaatcctagtcattggccaagcagctttgaacctaatacaagtttctgtgtattcatttgggccctgacttgggcaggcgctggcgtaaagtgcacacatggcagtggggctcaggcagcttatggtggaaagatttatcataacaatacttacaggataatttgacatcaggtcttaaccacagactctgggttgtgctccagagctgttggttctgtttggtaccctggtttttaattacattcaattttctgggaatcctcatggaaccagaccattccttaccattcaattacattatgctaccttatgtgcttccattttgtgttgtgctgcctaaaaaatgtttctcctaggaagggcaacagactggaacacaagcatgatgtgcatcccttctaatatcagccaagtggttgagtttgcagttttcaccatataggtatccttttgtataccttttgctgtgggtcagtaataaaacctacatgagactcttcttatattttttgttgttttttattcttttgctctcatgacttgagagagagagagagagagagagagagagagagagagagagagagagagagagagagaggggggagagggagagagagagaattgagagcaaactagctttttgactttgaagagtgcagattgccattaaaagctacaagctctagacttgacctgatctccacaaatgacataactttccccaaagttatgatgaaagccttcaatgccaatgtccattctggagaatatgactggaacaaaactgttctaaaaaaaaaaaaagcctaaaaagtaaaataccaaaacatacatttaaattatttatagaaaccacaaaaccaaaaatttgcttcatgcttgtactgcttagttttaactgtccatttaacctagaatcccataggaaggtagtcttaataagaaattatttagatcaggttggcctgtgtgcttgtctgtggtagactgtcttgattcttaatcaatatatgaagaccatgctggcaccattccacagcaggatcctgagcagtatacatgtggagaaaactaggagcatgtatgcattcatttgtctctgctctcatctgtggatgtgagttgacaggctatctcaagctcctgccactgtgacttcctaacagtgactgattataaaccagaactgtgatctaaaataaatcttttctctcctacgttgctttttgtcagggtattttatcacagcagtagaaatgaaagtagggcaagacccatgtgataaagggctgttgcccagcatgccactattgcaggtgatggagccctgagaggagactcttagaagagaccttgagtcactgaaggcatgactctgttacatcaagtgctttgctatagtgtggcaagcaggctaatacatcactaacaggctatttgaccaaacataataggcaatttaacaaacgtaggcaacacagattggactcattactaatcttggcatgccttgtcttccatttgactcctgtaccaaatttttctttccttttgttattatggtttctctctcaaacccagttggctcctctcacttcctcttatccaagctctttatgtcttcctaatcacctcctaagatgcaaaataccagtttctattggtaactaggcagggcagtccatctcttctactgtctagagctacaagcaatgcacagttgaatcaccacgtggatgctctattaaaagttttcatttagcatttccatcaacctagcagatgctagacactgctttagagaataatttaggatttgtttggaagcatacaatcaaggatgcctgatttagatctgctttttcagatacttatttgagcttccaatgtaaaattttagatgaatgaggataatagaagaaactcagaaatagtatttttctcaacaataaacctagtagttaaaaggcttccaaaatagagaccatttcctaaaagctataaacatttctaataaaaatccattggatcataatttcttcatgcaatgaagggagtcttaattaagggtgggcaatgtctctcttaccttagctactgggactatagctaatatagaatgttttcaacaaaatcaggattgggcttgaacccacaaccttgcatgtcaaacagctggtaatatatttcttaataggctacctgttgacaatgaaactcacagagcatctgatcttacaaagataaaccaggacaaagaaaatctatatcataccaaagaagatctgccaaacaaatacagaattcccggtaccctgccttacccttaaatgtacaagtggatcagctgcaaacagaggtggatctcatgttcctgaccattaccatcttggcatgccacgtcttcatgagcacttcattttctacattaaactcttgttttttgtatttataactgtcaatttcccctatctcctagtcctttaatataatccatggtctttgattcaatactacttctcactctgtggcctcccatgcaatattttaaaggggagaaacttcctttgtgaatgtaattataagtttaaccacaaatgatgtgactacctagtaagaggcaaagaatgttggcattcagaatcaagttgtatgtgcttcagataaacttttccctctccattgtattttatgtataccctagtaaggtgttaatatcacaatggataccatatagactaattcattaacataggaagataaattggaatagaatgcactaaaattcatatagagcctacttaactgctacataaacttcatcaatgtccactgaaactcaaccttcaaagtgaaggtcttattaccaaacatcatctcctgctcagagcacaacatttctgacaacagagaaaccaagtagaaaatggttcagtttgtttacaatctcaagatatgcaacagacttctttcccttctcagtagcacccaaccaaacatcaccctggccttaattcctcctaaaaccaattgttgcattcttacaaactttcttctttcccttcagtttgtccctagcccatgatggttacataatacactttttcattcagctggggaagagaatgataaatgtagaaagttatgcttcagaggttgggttcacttaagacccctgctgtatttgccaagtcttcattgaagtcttaaaaggtctaaatttcctttgtggattgattctgaagagatgcatagaagatttattcaaagaacaaacaccttatgcagagcacaaggaaactaaggaaaatgcacttttatgcacactcagtcatagccccaaagggacataccatttcaaaatctaaaattccctaaagcacactctatttatggtctgacttctctaaagagggagagataaatggactaaaaagtgtccaaaattatcatcaactcttcaagaacggacagtgaagacaattcctaggattttcttcaggatatatgggtagtatctgtgaaattcttctgataaagctgtagctcttcatcagtaacttttattgctgcataattgttgtatataacgatgggcttcataatagcattttttgttcaaatatatcattctgtgcttcatcttccattatcttcttagcttgcctttcccacttagttgcctttcttttctgaacatgtccattttctactgtcatatcataaatatataacaccagtgtgccttcatgtgaatgcacacacacatccaccacatagaaaaaaatgtagcattcatacagtattgtctttctgagttgggtagtttcacttattactatggcctctgccacttccatgcacttgtcctgtaaatgacataattttgttctttatagctgaataaaattcattgtgtgtatatgtcacatttttttttgtctatcaatctcttgatgggcacctatgctgactctataatttggttattgtgaatgatggaaatggaaagcagtaaccctttattaggtagaaattcactctttttagagtccaaatataagcatgtcttttcatcctacaaaacactttttttttctataggtgtatgtatgtgcaatttgggtaagcccttaaaagcttaacaacacaagcccatcaaaaacccactacttgcaataggttcactcttgactggatgatcaaggctcgatccctgtcttggagaagcagttgctgctttaaaacttgttgataattttgctgagataactccaggaagctcatttgacttcatggattcacccccacaagagaatcaccagtgggtgagagcacacatctttcagccatttaattaattcaccactttcatacacattttaattcactgatagcacatcccacatactcaccaccctcttcctcctacaagaaagagaacacacactgttttacatttgaaaactttatttgacttactcagatttaatgcagactctcattgagaagtgagaacaactatttgttgttagaactacttcagagttgaaactctgaaaaacatcagcaagatattttacataagttctttacctgtgtcaaaattcagcctaaatgacagaagccattcagaatcccattccataagaaagagactttgatccaaagtcttggccagaaattaccaagttttttcaaggtcatcagcttgtttaaaagatcttagctgtctacttctgaagatcaacagcttccagaaaacgtctagagccttgatttctgtcatattcagttccttgtggagttcagaacaggctatgtgtatagtctcctatggtttaattagaggtactttgttctctaaagttggtctttgggacctatgacattagtttctttctggattgagtaaatgtggctgcttgttccaaggactttatcaaaactattcattgttctttcttttccccagtggttctagtgctggtttgttggcacctaagtgattgtaagaagttgctttcttgtcagatgtttgctattatgacacaacaaaggagtccaaaagacgtcatgacacagtgactgtgggagcatagcataaggcttaaagatgatctgggtctttagccattcctgaattgttctgcttctcaaacatttagagcattataaaggggaagatgtctttaaggttgactatgctcctgaaatcaattgcataagctttcctctactgttagccacctctagcatccctgtacccacaatctccaactgaagcatttctgaagtcttcccctgaccttttttaacctggaaaagttcttccctctcccctgctcaatacctggagtttctgccaaatgcacttgatggtagtagctatttcttgctatagaatactctaaattctcatttgctcttatttggatgcctttttatatattctataccttgtggccatcatcatgtatttgcttcaaatatagtgttcctcttagggcattggttgggcaaacattagtgtaacttagaatcacctagaagtctggtttaaacagatttttgtggctttacttcagaatttgtaatccagtgagtctttggcaggaccaaagtgtctgcattgttcacaaatttccagattatgctaattctgttggtcacatgacaattgcagaaatatttctttgagccagcaatatgatttagtgacaagtacaataataccttgatttatgcagtgtgtttgctcagaatggggcagttgaataaaatctatgagctcaaagacatattttaagcatgaccttctttggaaacagacaccttgagttggagttatgaggttataagaggaagagaaatgaattgggtcagagttggaagaaaatgtcttcagcctgctcataattatgatttgttttgtccttctgaggtaattagccatacttcagcaaagacaagtaggacactttgtgcttactcatgcgtggtagataacaatacagcatcccactgtgaaaaaggtgagattatggggttaaattagttaagattgttatttataagacaagacttgtaatttaggaataacatctgggtagtaactgactatctccgtagtagaatccactgacatttgagttgaataatgatgtagaatgtttggagatggggaaagttaacaattcaatccttacccatgcagcaaagaggacagcaagtgacattaagtgtcaaatacaaatgtcacagttttttttctcaccaatagatcctagattgtatacagatacataaagtcatatatactcatatatgtgcaaatatgagcatatatagatacatatatatatatacatatatatatgaatatatattcatgtgaatgtaaaaaagagactgagggagagaagcagaccagtaggagggggaaagagtaaaaaggctgcatgttggagtggatatggtcaaagtgcatgacatacttgaaagaaattgtctctcagaagactatcattatatatgatgaatatgtaccaataaaaacatttttcggggaacccatggattggcagtggagcactgctatggaaacccacatacgttcttcatgttgcatgtgaatcttgtagtctgtgatcattgaccctccctcccaccaaggtaagcaatccattatttgtagttggcatcatttatttcttggttccctcctcctgtgttcctaaatccatcagctgccccagtagtcagtggatgcttcctgttttcaattttatcttcaatccttatttggatgctttaagtttgaaaatagacacatgataaatctcaacataaattgaacaattacatgtttctgtgtaatgtgcctttctcagtgaagttttccttttgataaaagggacagttaagcacttcctttttgtgtgtgctctactctaagagaacagtgctgagcgaaaacaatgtgtaaaagtaaccagtgcacagggcagagaaatgactcagtggataagagcacgggctgccaagcctgcatattagagactaatcctaggaccccatagtggaacatgagaaagtactgcaagttgtcctctgatctctgcacatgtacacacacacacacacacacacacacacacacacacacacacacacacacacagggacacaagcaggcatgcaatttatttatttattttgtaatttttttattagttcaaattaggaacaagcttgtttcacatgtcaatcctttctccctcccctctttccagccctccctgctacccctgacctaccccctacccctgggcagtggatgcaccctccactccccaggcagggtaaggccctcgaatggggcaccccaaagtccaccacatcatcctgggtccagcctaggccttcccccctatgtccaggctgagagtgcatcccttcacgtgggatgggctcttaaagtcccttcttacaccaggggaaaatactaatccactaccaggggccccctagagtgcagaggcctcctaattgacatccatgttcaggggtctggatcagtcctgtactggcctcccagatagcaatctggggtcgatgtgctcccccttgctcaggccaactgtttctgtgggtttcaccagcctggtaccgaacccttgaaccctttgatcttcattcctccctctctgcaactaagttccagagttcagttcagtgaatatctgtgggtgtctgcctctgcttccatcagccactggatgagggctctaggatggcatataaagtagtaatcagtctcattataggggaagggcctttagggtagcctctccaccattgcctagattgtcagttcctgtcatccttgtagatctctggaaatctccctagtgccagatctcttcttggacctataatggctccctctgttatggtatctctcatcctgctctcctctattcttcccccgactcgacctttctgctcctccatttcctcctctcctcaccccttctcctctcattctggcagctccctctcctctaccctcatgctcccaattagctcaggagttcctgccccttcccattcctggggttcatacattttcccctagactccttcttaaacatggcatgtagtcactcatacatgaattttagacatagagcaaaggattaccatcaggcatgcaatttaataaataagtgagtgaacacataaaaggtagagctttatttttattttcaaatatctgcattttgggacaattttatttcctacagtaaatatatgaaacattgtactttttaatatatgtatatacatattatgttaaactgaagctctggacacatttatactttgcaattaaaattgttttattagtgactatttcaggattgaaataaaattaaggcactgaaataatggacattgaaatattaaaaacattttaaattgtcagttttagtctttgatttttaaaattaaagaacatgagcttgaaaaaacatatacagcaatacaaacaggacagaagcagaactgaggtcactgtttaaagtggaactgtttggctaagtgacagattacattcagggttatgctacttgatggtcaaaaatgacctcttaataattttcttatgagccacatcctgagaattactaatgaagctgactgactacagtttccaacgcgactctgggtctatttgatgatggaggtgcctatggcatcatgaagttttcttccctgctggagcctaatgtctccagacccacgttattgcatacgataatatagctgtcctttgtggcttcattcaggccagagggcttcactgcccattgtctggaagtaagtttctacctgaataaaatctggttgggtcattatacagaagcactaattttgcttttctatcaggaacaagcagagatcaaaatgaaagaaatattcactagcttttgaatatggtaatccataaagatggaaattagtaatgacaaagattatgtcttcagcactctttcttttttctgatgttaatggaagggggaattacctgtgtatgatgtgtttaactttctttcctgatgtttagtttctgaattggaacttctaattttttcattgtatatgttcgtgatgcatggtattttgtacatagagacatttcttacaggtatgtattgtggattggctatatttctgtcatatttccttctttcaaaaagtctatacttccaacggtttcttctgttttactagacagattcactcttacttttgtgctatataaatctacattattttatgtgtctatgttaagtctagaagccacaatgaaagaaaacataagatatttgtctttctgagactggcttaaattgcttatatggttatctacaactgcgtccatactttctgtaggcaatatagctgtctctttatgactgaaacaattctcttcttacattccttggtcgctgaagctgatcataacttggttatcacagtggtgttgcaccaatatgcattgatccacaaatatctctgtgatagtgtgccttcaatttctttggataaatatcagtttgtatggtaggtctacttttagcttttaccctttgaggaccacctatactgattctacagtggtggactagtctaagcacccatcagcagtggtttaagctttctttttttgtccatattagcttttgttgtcatttgtttcttaatgactgacattctgaccggattaagatgcaatctcaagataattttagttgaaatttctctaatggctagtgtaaaaagtttatcatctatctttctatgtgtgtatcttttgtctgtctatcatctatcatctatctatctatctatctgtctgtctatcatccatccatcatctaatctatctctctcaaaaccaaaacaaagccccaaaatgaaaacaataccaaaacaataaaaaataaaataacatagtttaaaaaataccaaaacaaaacaaggaagcagacaaaaacaaaaaaacaaacaaaaaacccaaacactccagtctgctttgtgttggctgactattcctgggcatgcagcctccctggtgtgtgcttgataaaccccggccacctttctgttgagagggcctcttcctgaaacttgggctaaagttttaccagtcgggctggaatccagccatccctagggattctcatgtctctttcttccttaaagttggagttacaggcatatgtggaatgctcagctggttacattggtactgggatcagaactctggtgtttatgactggcagctagcaattttaaactgccgagccatttctgtaactgtaggctatactttttcaaacatttaatgaccattcgtgtgaagtcctgagtgaatgtgtaaagagcagacagaggtcttggtgaatgtatatttagacatcagtttttgagcaactaacactcctagacagaaagctgttgcccgtgcctgtatcttgcagtgtttccccagttttttcctctaagaatttcaggttttacatcatggtctttggtcagtttggcatgatttttgtaatggagaccagatagcaatcctgtttcttgctgccatgtatggctgtccaggtttcccagaccatttggtaaagtgtcttttctgtaatgtgtatttttgacattcaaatttaggtgtctgtagctgtgtggatttatgtctgggttttctattctatctcactgatctctgtgccttgttttatgccaatagaatcctgttttttgtttgtttgttttctattactttgtagcatgacttaaaatcaggtaggtggatagatagttccagcattattctttttgctcagatttgccttgaggattcagggtcttttgtgtttccatggcaatttcaatataattttcctatttttgtaaagaatgaaagtgaaattttgttggggttttattgaatgtttagattttttggtagtagggatatttttcagaatatcaacacttttattacttaagcatgggaagtctttctgtctcctaccttcttgctcttgagttatttttccagcattttaaagtttgcagtgtgatgtatttcagttccttgaatagttttttttctgaggtatttattaaggacaactatagtttgaatcatttctttatcacagtggctattaattatatataagaaagttaccagagttttcatgataatattttgccctgcaaggtgctttatttttgaagcctttatctgatctaataattctctaatgaagtctttaaggtctcaaatagaatgatgccatcaataagtaagcatactttggcctcttttcttattattcccttcatttccttctcatgccttattgctctacctacaacttcaagcattatattcaactggaaagggaaaagtggacgcccttggctttttcttgatttcattggaaatactgtgagactttcctcattaggtataatgctggcttcaagtgtactggtaaagtgtcacaccactgtcaaatatttactacattaaaacatcttagagtaaacttgaactagcttttagagaaaagcaaattagagattcaatggggctagctgacaatgtacataatacaatagaacaaagcaaaggacagcaaacacaatgagaatcgtattaatattgaccaaggtcttagtttacgttagggacttacataccaaagccagtgtgttagtcatctgagggtatgtagatcctgtttaattgcaagttgtaggtcagtaggtctccaagaggaggtgatgctgctatctagttgagtacatgcattgtgtagtgagcggctgagtgctcacatggtgactaaaagtgaaaagaaaaaattaagcttggtgtaaactgtgaagcatcctgaaaatgatattgaaagcatagatttaaacataaataatggggcagatctaatggattcagacaaacttgcatgaaataaattgtgattttcagaatagccacagatgaagagacaacaggatcgggaggaaatgattatctgaggagtcagggtatattttgagacataaaatacgtttgaggcaatgataaaaagtaaaagaaaaattttccaaaatttacagataagctcaagagaaaaaacactgccattgcaaaaactagtaaggaaagagggttggtagacatgacaaatggcacccaggtgcaaatgctgacccatcacatccagagacaacttgatatcattagcaagcttggcagaaaatggagctgagaggtgctaaggaagtacatattaaaagagacctgagaagtttgggggagttaaatgctaattttttgaaaggatattattatgatctcagggtaaaagaataaaagaaatgagaacttagattctgaaatggatctggaacttctaaagccctgtataaacattggagtacagagagtaaataagcttcagctgaggtcttattcataaaacatcagctaacgtgtgtcattcagcttcttaagtagttacagttcaacactttgatgtgttgtggttcacatggctcagcttactgcagcagttcaggtctagcactcctatcattattagctccgtttgttgtatattttcaattagagatgttatagataaattttgagaagattctacttgcgttgtcactccaaagactgttttgaagatagcagattcagctcttagaaactcttttattcgatgcactcaacattattgtatttattgtggcagaaactctttgttgtctcttagcacatatcccctcctttttccatagcatcatagcattcattcttcagttacatgaatattcagtttcttttacgcttagttatggtgaaagtgtgagcaagaaagattgataaggaaaacaggatgtggaggggagtaaggttaccttgtatgaaaatgtctttatgtaacacaatctcatgtacaatgaacacatataatgaaaatttaaaactaagtaaaagatcagctactcattaaagcaatgactgatgaaaattcattaaagtgtagtaaggttgtgttcacccattctcatttctttctatgacaattggacctgttgcagaatagtaacccacctcacactgtatggaacaggagaatgacatggtgtgcacatgggacaataagtcatctgagtctaattttttcatgtccctgagtcaccaagaacctatacacactcataatttctcatgaaagagaatgtttctattgtatatttaggatttcattacatcagctaaaaatattttctaaccagttcaggttactttaaaaatgtctgagaagctggtagctagacttcctaagcacaggctcttgcaactttctgtagtaagattaactactagaacatctttctcccttttgccttcatccctgaagtctctacacacctgttccttcatccacccctctctaatggaggaaacaaacatttcttttccagagtgtccacactttcacatacactcttaatcatatctcttcctgacccttcaatgaggcaacgaattcttaccttcaacttttttcttttccttgaatattcaagtttcttgaactgtgaaatgtaatttatcggttggtctaatacattttgatttcattttattttatgtgaaattacttaaatgccagagctatgtacactgcctccatttcctttgcacttattctgtaaaaataccccacgaaatgactttctgtttaattactaaaactggtattttatggcaagtgatgtggcttggtgggttaaagtgcttgttgtcatgcctgacaacctgagtttgatccccaggtcctacatgataaagaagagagtttatatccacgggctttcctctgaccttcacacacatgccacagcctgtatgtgtgcatacatgtaataaatgaactaatttaattttaaaaatgtatttaaaaattaaatacgaaattaatgtgttaaggattctatatcacttaaggttcttcagagagtattgtattaaatagatacacattattttaaacaatatttaatgcttgtttttagttcttgtcattataaacattataaaaaccagccatcactaggctatacttgctctgtcctttctttcttgttgataattgacattgatctctttggatggagaagtggttcagcatttaagagcgctggctgctcttccagaggacctgggttcaattccctgcacccatacagaggctcacaactgcctttaattccaatctcagggaatcaaatagcctcttttgacctctatggacacagtgtgctggtgctagatagacacacataaaggcaaaaacacttgtgtacataaaaataaaaaaaatattgctttcatgtttctataaagtatttcccctataattttcatatctagtaaaagcagagtaagatgaaaatatgaaccaactcccccatgcaatgcaactatttttcccttctcattgctgcttgtctaaacttaggttgacattctctcctcatatttcagtatttgattacatatagtcattgattatttacaagttaaagtgtcttattaatgtgatatcaggtagggagggtgggtctgtataatctccattcactcaacagttttacatcttgacaaactttatcctctgaagaaattcaggtctcatctatgggaattccttatgtgtgtgtgtgtcagaaaaagctgggcaaagaaggtttgatagagcagcttagaaatttgctgtcatgtgtaatattatcatgtacagatcttctagaataaatctatcaaggatcacttctctactgtcaccacaactgatatctgaagaagatggtgtttatggatctagtacagtcacaaagacaaggcacataatgagagcggcagaggataagaatggagcagtcaaccaggaaaagagatggaactggggaagtagaaaattatcagaaaaatgggatgttcagaattcagcccgtaattagagactaacaagcagaccttcctttgtaaggctctgggtagtgataggaacatctgaatgttagctcttacttcacctgtgctgtatattacaaggtctcattatttctatgtcacagatctcaagtttgtgaagcagagataggtctctcgggcatttccatgttagttttgtttttaaatatccaatttgtagcaaatgaagttcagaggctgtaagctacaaatctacagcaggtggcactttccaacattgacttcaccgtctcctgtcccatatagtctgtgataatctcacctgtcatagactgtttgggctgctataacaagttgtcatggacaaggtggatcaaaaacagctgtttatgacacacaattcttggggctaggaagttcaagatcaaagtgctcatagactggttctcaaacagccatctcctctttctgtccttgcagaagaggcaaaggagctttttcatcatcacctgtgaaggtaccaatcccattcatgaatgcttcacttgtaacacccaagcatcctcccaaggcaccacctcctattagcaccatgatgggttaggatttaattaacaaaagttttttgttattgttgttgttttgggtctggaatacaaatcagggctcaacatcttgctgcttacccatttgtaggtaggcttcttctgccttaatcttgactacattagacaagagacaattttggactcaatgctctgtgagtttctcagagtgaggccattggaaccaatgcagtttctgctttatgtctggaacccataagagctctgagctacatgctgagttcacccaccctggatttacagtgcttaaggaatgcctgaccacacagcaaggtcacatgtcagtgtgagtaaaatgcctctgcttaagttcatcccttacttttaccagctgttctggtattgtccctgcgcctataaacatcacaaaccagagacaagccaccttgatacacagatcgctaggccataaataatgatgcaatttcagctttatgacctgaaatttaagatggtttgtgatgtgtcaaatctagttaacataaaaatgtaacataccctcttcaatctgatggcaatgctggataggtttattaattgacatccttgttgcttttcattttattcctgacaaaaaggaagacaagtgagttggaagccacatttgagaagaaaagatgtgtttatttaaaatgagataccagaattgagacagtttgttgggcatccctcagcctgtaatggcaaatgccccttttccttgtcattacccgggattaagaaactcgcctaaagacaatggagaagagatatagcctgccccaaccactaaatcctcatcttttgcctctgataggccaatcatcatgagccagcacacacaaactgttgccttgatgcagagcagctgtctaattacaattttgttattattaattacagagtagaaaatcatttgtaattagctcagcctaaatcatagtttaaacagccaaaaattacattacaaactaaagtgtaattaaagcactacactaaagtgtttatttaaacccagtttagttgcaaatttttcaatcagcttttcagcctcatacatggatttaattagtctccagtactgacagtttagtgcatttattcattaagcatcaatattgctgaacaaatgtaaataaaatatagacggcgatgctttaaaggggcagtcacgggaacatctgggtaagataatgaggctggaaagacgtgaatgttaatgagtctcctaaactgctgcgagcgctgtggctctgggaagccaggcgtgccagtcagggtggatgtacagtgcagctgtctgctgagtctactggactggctgtggggccatgtggggtgggggtcggagtcaatttaattcctgatgttgtgattaggcacatcgtaggcgcgactcagtagaattctggatgaagatgaaaaagagtatcatctctatcggctaacctttggggctctccacatcttctcaagagcgcatgaagatttccagggagaagcaactactttcttgaagggtttaggggaagtgatctctagcatgatgagtgtcatgcacatcccaatgaggaaattttccactcaagggccattgtttggaaaaccgtccttgccacacatgcaaaaatgcctgaatgcacttctaaatgagctgcagcatcttaaaagctctcagcagggatgctctgcacttgcttggtaggactggcactcctcatagcactccttggagctcctctgaagtgtcttcagaatcgcccttgttcttgctggattacctcaataggctccaaacatgccttccatttcccagtctggtttccccaccaactttttcttccattttcatcttactggcagaattgctgctctgagaatgccagcctctttatgtcctttgtttacttacaactttgggctagtacttcgctccttccatcattctaaaactatgtcagtcagatttctgttactgagaccaaacccaagacaaaagaaaaaaaataagtgcaaaggttcagtttgggttttagaggtgccaatcaatggtcacaggctccgttactttgggcctttgcagctgcagtgcatcctggtgggagcacagagcagaagagaccttgtcatctcttggtggtaggaagtaaagacacaggggagtcggctggagtgccaatagcccccaagagcattactccatgaccctatacttagtctttttaagccctacatcttaaatgctccacatttcgtaaaagcaacacaaacaagccagccagtgtatggctttgtggaccttttcggaccttctaaataccaacttcagcaaatgacatgaggccctttgtggcccagtctgtctctacttctttatcatctcatctcagggctcggcctcactctagaacacattagggttttaagtcttcacaagccaagtttacttcatgcttcttctacttatacttggcaagttatctgtttctgcctatcatccctacagaaaaatcaaaagtcagtttgagcaataccctgtttggagccctatatggaaactctcaatttatgctactagctctcacacagattctttcatgttactcacactatatatatattttgggggaaagcggtggctgtgattataacacaaaggaatgggaaagtcattatttgtatcagtgtcccaggaccttcctcagtgctaatgacagcctcagtgatgcatctgatgaatagtattgttctaatttgctttctattgctgtgttaaaacactatgaccaaagcaacttgtggaggaaccatctcatctcatcttgcatctaacatcacggagggatgtcagagcaagaactcaagtgggaaactggatcaggaactgaagcagaagccacggagcaatgcagtttactgagttgctttccatgccttgctcagcctgctttcttataccacatgcccagcagtggaaccacccatacagtgggtttggcccttctgcatcaatcattaattaataaattgcccccatagatttgctgacaggcaatctgagagaggaaactcctcagttaatattcccttttaccaggtgactctaggatgtatagagttgacaaagactatcaaacccagagccatgggcatgctagcaattcctctaccaccgaggtgtttccccagttcacagttcactgcatttttgaaagacagataaaggttttggaaatagacataaagaaaagattaataaatgacattaatgataaagttgtataaaataagtttgggtaaaaacaaaagactatggctgaaagtagtcaattagttatgtgctaattgttttggttttgttttttaaattgtctcaagtatagtaacacaattagagaaaaataatgctaacttggctgtgttctttacacacagaaaagagtttgaatgttttagttactaatgctattactttagttaaatgttaatacgattagagagaaatattctgaaaacttctgctttgtcaaatacataatcctgaatacaacactgagttggggattctcctactggagaccagttctgttctaacatgaatgtgtccttgggtaattgacttttcctctctgtgatttgtctcctaattctgaaatgtgcattatactgatacttgacttttaagactctaacctccccaaaccatgagcccagttacattctttcttttataagttgtcatgggtctcctttgccgggctttggtggcacacatctttaatcccagcactcgggaggcagaggcagttggatctctgtgagttcgaggccagcctggtctccagagagagtgccaggataggctccaaagctatacagagaaaccttgtgttgaaaaaaaccaaaaaaaaaaaaaaaaaaaaaaaagaatacatttcagctgggaggactgtgaggaaggctggttggcttatataaacacctaagggaggcagaggagatgtgtgggctcggcaggagaaaaagcaatacaatctgtgcagagacaatgacagctggcattctgcagcttttgttgtagatgagaatattcagaattggggtaagttgggtattttcagttatggtggcagcttgaatggttagcagctgcttcttcttgaccagatcttcaacacgtataacttgtgtgttactcattctctatagtactgatatttcatgctggaacttaggcaagaataaatgatctatttttggcaaatatggtttttttcctgcttagtttttctgttactataaggatgaaggaagataaaaatttaaatggaattgttttgatgtttatgaggattgtatatcctcaaaaatgtaaagtatcagtattaaaaaaaaaataagttgtcatggtcctgaagttttgtcagggaagttttgtcactatcattctttggtagcagagagtgggatgctgctgtgaagaacctggctatgctggtttttacagaaatatggaagactttttgagacctagtgtaagacccccagaaagctcaggctcccaggatctcagcccaggaccgcggccaccccaatcaccaagcggagtcgaaaacttgatgcaaactgcatgagcctttattgttgtttaacaagctaaccccatgttagctctggtctttcatccatccaccatggtagatggctacaaaagatagtttgaagcggctgcatagagatcttatagggcagcgtaaggggagtgtctaggggtacgcacaggctcaggattggtgtgcctccaggcttggagggtttgccctgtgttgattggtcaactggttgttatggcccataggccctcccagggtggttgctatgctctgagcatcattgctgtgtgcttgtccataaagcacacccagaaccataaagcatagcaccattgaaaggttcaggcattatgctggcctgcccctgttacctggtggaatccactcaggcaatacccgggtcagcccaaggttccatgagaaagaagtctgcacgcaggtgcagaggacccctttaaaagataggcccctgcccctttactctctctctctgtttctctgtcctactctgttcctctgttcctctgtcccgagctctgtgcgctctttctgtctctctatggtgaccggccatggcggtcagccattaccctgttcctcttcttagtctccccattctaccggcccttataataaacttatagtcaatatgtctgtctcaatatttctcttttcttctttttaaacaaaacaataacaaccaccagctaacttctgattggttccttgccacgaggcaggcatctgacttcctagtgaccaagggaaggtcagacaagcacatgttcgcctgttatggctgtgaaatggggagctggtcccttcactaggactagggaaacagttgaatgatgtaagcaggacataatgagccatcttagttggattttggaaaacagtagtgctgagattaatgtgaaatatgaacaaccaggtcaagaagtttcagaaggcaacaacattagaacctgggttagagaccattcttgtgacatttttgtaaagaaagtggcagtcttctgctcttgttttatgtcttcccaaggctaaatgaaaaagtactggactgatttccttggtggaggagatttcaagacaacctaacattgacactgtgatgggtgtattagtaatcactcttatgaagatctatgatgaaaaagagcaagttgagcaaacagaaatagaaaatgtataatttgaagagaaaacagcttcaagaaatttaatgttgagccaaggcttgtgctgaaagagataagaagattaataaaagggctcatttaaaatgaaataaaggaatgggtgtccttggagtaagaccacacctagttaagcttccagcatatgaaaagaaaagacctaagcaatttcctgcttttcaaaagcaacaacaaaggaaagctgctcaaatgtgattcaaagctctagactccatcccaagtagacaaccgaacttggcagtgtcttccatatactctgacattaaaaccctgaagggtacatgaacaaatgggttgtagaatcttcctctgtggttaagaagagtcaatgagatcaggaatgtagcaggggagctccttcatttataacatcagtggtcattgcttggagttctgaaggtgaagcttgggttatgttagagacccaaggatgttggcggttccagagccatgagatgtctgccaaggagagttgcacacgggtaatgaaaccagcacaaaagagggatgcatattgcatgcagcaaagctgggagggtagagatatctaagccttttaacaccagacatggaattacaggtcttggagtttgccctgctcagtttcactcttatttcattgtatttcctcactatgcctcaatctttccctttggaaatagtatgacttttctgtgacattgcatgttggaagtatataatttgctttttgattttacactgaatcaaaattaagaaattgccttcagtgtcagaaaagaccttaaactttgaactcttaaagggtatttgaggtggaaagactataaggttctttgaagttggacaaaatgcaattagcattacaatatagccacagatctatgagggccaaagagtggaatgtggtgatttgaataggaacaatccccataggctcatatgtttgaatgctgggttcccatttggtagaacagtttcagaaggattaggaggtgaccttggaggagttgtgccactgggggtggactttcaaaagcatcacaccatacctagttatctctactgcctgacacttagagatcaagatgtgagctctcagctgttcctttgcactgacaccatgcactgagccctctgaaacagtgagaacaacgtaacattttcttttacaaattgccttggttataatagttcgtcacagcagtaataatgcaactaggccacaagtactcccaaatggttttcaagtactgctttcatgtttactgtttactttcttaattgagatgtcaaaaatgtatctgaacaaagtcaacatagtttagaactccgcccatcaggaacagataaagacccagaatggagatgggatccttcacaaggtgagaggcccacaggcacagtggtttccacaattcctggcacacatttactgacctagtcaggaggctcaggctggcccagtataaggcccacaggtgaacaggaagctccatgactcccagcagaggtagcagaaactgacaagccaggatacagctggatctgatcctggtaagaggttcatccttggaaatggagcatatccattgcagtcattcaagagagtggctgagccttcgcctttttatcttaaatcttagtgtccccactattatagttactactgcagggcttgagatcacccttgggtttgtacatgctaactctaccttggagctgctacatctctagctcctggttgtttgttttgagacaagttcttaccatgtagcaaggcccctctttagctcatgattccccatgctctgcttctaaagtgctggaatatgtcatgtgcacacagctagagagtatcttcccttacaagttgatatttgcctaattatcttggctctaatttgtgttcatggaactaatagggtactaataacgcatccagcatgttggaagtagttcctactgaaatatttacgtatttttcttcagtttgtaataatgaacttgttgagctgagtcttataaacctactgaaaaccaagaaaaggacctgcatttcagttgcaaattttgaatctatgtatctctgagaaggaagtcaataaagtcactgaaatccctgcttgtagtacgaggctggcactatttgcggctatgagtgccacaagaaggaaggaagtgccagtttgattttcaatcaaccacctttcactttaccatttaacattaattttataggacagcttctattgtgcactgatctaggtctgtgaaaggtttttttctgcttagcataatttcaactaagtgccactaatgaattgatatcaccacagaataccccggcctcctttgaggaatgtcatcataaactgttcagtaatacttgacatcctatgtatgtaaaaacaacatgctcctgtacaaggaccttttttccccataaggatcaatgagagaagtttcttcatgtgtttttgctttgttttcctttttcggaactggattttcacattagattcatgagcacattctagtaatgagagagtgttttgttacatccatccttcttttcctcacttctgtctgattctcagttctctttgtttaaatactttatatacgttttagtgcttgtaaaaacaataatgtggaaatgcatgattgagtgtattatacattcctgcatctcctttatgtttgaaataagaactaatataaaagacaaatcagaataaggaagaaaggtggggaagaggtataaaggaaaaaggttcttaaataccttgaaaatttgcccaaatatagtccagccaagtgtcttaggagcagagcaaataagatctattcttttgcagattggggtgtggttgctatgcagtgatacctgcatctgtgaatccatgagtacctttaccttgtcttcactctcaaggatgtttgctttgtttgccgtaactatattatgatgacaatgtctcatttagtggagtgatgtgatgcattctagaatatacagacatcgtcattgtcacaaaggtatgctttctgttgtgaaactcaccatctatgtattaatttttgtgtgcaagtttctgctgatttttttaagttataatttatgattgctctaagtgtagggataccataaaagattgttgaatttattatttaaattcttgtccttctgtaggagtttctttttcttttatatcatctgaaatgaattcagagccattataaaagcctgcagcagctttctgagaatcgaccgcttccaccaaagttcttcacactctgacagcaaattgtttgaagtttccaagattacaaaaacagccagtcttcagggaaaaaaaaattaagtttcttatgaatacattttttaacttttctttgtattgctaagttaacatgaagtattaaaatttagtgggtaaatgtacagtattgttaaaatgttagttgaaaagaccaaattctgcttagtaagtgacctaaaattctacaccaagagttggaggtgaaactaagattaaccatggaaagccttcgcctccaaaatagtcctctttcccacccctcagattcctcagagaataaaagccatcatgccataattggatataaagcttgttctaccaacaccctagggagaaaaagaacattttcataaattcatactaatataaacatgatcggtaccacccgagctacaggaccataactgggatgaaacttaattacagtctgaggtctaattgtgaaagtttgaagtactttttcctttcctatttactaatacaccatgaagcaataagacttaaagctgcatggtgtttaaatggacagagacaccagaatctgacaaaagagaatgggctcttacatgggaccgagcctggagtgtgcaatggttctgtgactagctggcagaggtctattgcacctagtcagtgtggagtcacttaatctagtcattatgtggatatacctaagttctctgaatagatggaatagggatgccctcaaaagagcaaattttagacccacaaccactagtacaatcattgccctcttcttgagccaaggcgccactagattggtccttcaaatgaactgactttttagagccctttccctatggagggataccttgctcaaccttgatataggggagaggggcttggtcctgcctcaacttgatatgccagactttgttgacttgccatggaaggccttaccattactgaggagtggttggaggattgggtggggggaaagtggggagggccaggcagaggggagggagaggaaactgtggtggacatataaatttttttaaaagcttttaaataaataaaaaataattaagatttaagcaatttaaaatgtcctaaaacaaaacaagaacaatacaaaaacacagctctgattatgattgttttcaagttggaatacaaagttcttaaaatccctcatctcagtcttgtgggcttgctgggcttgctgttgatcaatgtcttgtgagaaaaagctgccagcaatatagattgtttgaactgcttactgttatgtcaaattcactttaacatctgcaaatagacatactgtatgaatgctgggggcagcacgtcttctctccctgcacttaaaggtctaaagttgtattgatttttataatcaactaagctttataatccaataatgagtcctttattttatccttaaaacagttgattccttgagtcaatttctgtctctcattttcccatcaagatgtaaataagtatttagaatgaaatcttcaacttgagtgattggtatcatcctattgtcagaacttctgaacctatttctctttatctgccagcagtgttaatttcacagccagttcagttaatgtaacacctggagtaaaaaatatatttctacatctctttaccaaaatataccagatgttcttcttccatcatgaattaggcactcatctatttttcaaattcttaagacttaatagccaggggctattctgtgcatactggtgaagcaatgattgtcttgggcttacaggtgtttataggcctggttctgttggtaaggtactatagtaaaagacacagggaaaggaccttagccatgattccttgttattctccaatgacacctctgtgactagcatccatacactttatcataactcacttacccatatcatcaatggcctgtattaagggctcatatatcctttttgtttattttttcttttaccttttgagattataatatcatttcatcattttgcccttccctttcctccataggaacccatcaacatatactccttactctcttttgaatccatgagggcccatatttttaatgttcactgatagcagagagatgtttttatacaaagaatctggcttaaccaacgtaaactacttgtctctgtggtaatgtgttaatacaagttttcacctataatgtactcacacatctgaaagtcaaaggccttcaccatgctggtaattaagaatttggaagaacctccagtcttgtaacacatttaattcatttattccaaaagtgattcatacactctgttggttttacaaagtcaaataagagactttgattcttgatgatagcacagcaaattgcaaagtcttccctggacatttaaaatccaagatatatcaaaaggacagtagaattggctatgtgacctaaactgtgtggtggtggaagaggcagcaggatggcagttctagtcagagaacagactaagacatagcagagaacataataaatgcttcagtaaggttgaggacaccaagatcactgggctggagtgaaatgaggctaaagagggaggaacaggtattgacttttgaatgggtttgtaaagtatattataacgttcaaactttatcttagccacaaaagtaagtcttcttggcaaagtttagcattattaaatcatacttgctgtgcgaacaaagtttggaagtcttttaagaacacggagctcaggcaataatgtttattacaaaaatccaggcaacaaaaggagatgaggagagataaattctgaccatcagtatggggaaaatggatgcattcaagaggtatttaaaaggtatggccatttatcacttgatattgtgccgtttgaacatttagtttctttttcatcgacctatcatctgtctattgatctatctatctattcatctatgagtctgtctaacattttatattccccacctattctgaacaaggaaagaagtggagaagaaagagagtgagagtgaaagagattgagagattaagagagagagaaagagagagagggagagagagagagagagagagagagagagagagagagagagagagatttcaacaatatgggaaattactggaaatctggcctgtcttggtacgtactagtatcattggtatagcactgaactgggaccaacacattgtgatgtctctgtagtcatgaaactgagtacagagttgaaagtaaggattcagaggttatgctggcctgcccctgtcacctggcagaatgcactcaggtagtaccctggtcagcccagcgttccatgagtactagtctactggcagatgcaaaggacccctttaaaagaaagacctctgcccatttatgctctgtttttctgctcttttccagttctcttacttgttgtctctttccactgttcccctggggcagacagggctttgcctgtctccctcttctcttctgtcctctctatgtgtctctttaccccttttctctttccttccccctccctcccctttctaataaaacttaatctctgtctgcctggtatgtttgtccctcggtcatccttgactgccatgttatccatcatggttccccacccaaggtctccctaaagctttatcctaacactgaccatgcattaagagcccccaaaataattggtaagcttcaatgtgtcttagtgaaaccccaaaatgaagcagtctaaattggggtacacatggttctgatatattcctatacacagtgttgctaaattgttagttactggtgtcatttttatggcatacatagaatacacttaatcggaagtcgtaaacaatgtggggtttcaataatgtcctgagctggatgccccattggctgacatctagttcatcatgcttccagttcataaacacacttgcccttgggctgttagagaggttaagggctttcatttcatatgaaactggtcttattgatttttcttccacatgtactgggagtgagataacctagaccttgtatttattatcccaactaatcattactgggatcaaactgaataaatgtccacgcctttggtgagtttcaagcactcaaaactctgggtgccatttcagattttcatgtagttggcaaagtgctgactgtctttccctgtctgtcagatgttttctaaatgatgtatctttacttctcaggggtccttgccttcatcacaatcccacgattacttaatttacaaattcccttctatatagttccttatctctattcccttatgaaattccagtaaaattagcttaaagtgattctgaatagttttgctttcattatcatgctagggtaaaaacacaaatgcaattagtctgtaatgtcctgttcagcacagtggtagatcatctgcttattttcatatacactagtttgagtcagttctagatatgttgtagagttagatgaatgacttacttgtctagatttgattccttcatttaataaatggcaatttaaaaaatgtaagccacaggttaatagtaaataaacacatgcaaaatgcttttgttttgttttgttttgttttgtttaatgaaacctagcccaaacaaatggttataactaccggttccactattctctttcattttataaccaacttatttattaatcagagaataattttcttacttcccagttccttaattccaagtaaaccacaacctgagtagcggtgtccacaaagctccgattctgagctcttggttacattttgatgtgtgctcaagaaacttctggaaaaaaaattcacaaagtaaactggttggagaggtcacaaagttttccttggcgcctaaaaacagagaacatacaaaaaccagtctaaataatgtcaggaaacaggtttaataatttttggtgttacaactattaaatgaaacacccttaagaacatagaaaagaaaaataaatttgcaatgataattcaaagtgagagtaaagtttgttctaaaacttctcacatatgaacatattcaaatcatagcacagcacactgttgaaaataacagacaggcagaaaaactagggagtccaatccggaagctttttgaactttgcctggaaaagatgatggaggcttgggccaaggacttagctgtcaacttgggacatatggaggtcttcttgctcccgctatgggataactatgaaggacaatctaggtttaaattctccatagtgtcaaagagactgtacctccattcagcattgctttctgcttagccctgcttcccatctctccatattgcatagattcttagtgttcaacttaccaaacctctatgttaaattttgtctcactgtggagcaggcagtatcactttccctatagaaattattataaattgtcactgtggaggtagatttttctccttacatcatttttgcaattgccaaatgaagttttactcataagtggttagttgaaatctgtcatctaactagaagatatattttagggaagtattgctaagaatatgcagttagctctatatgaagcagagggaaagaccaagatattttaagttaaattagcaagatgtatacgctatttaagaagaagatcattggttataaatgaatttaaaaacaatggttgaagttaaatttataaatcttgtgtggaaaaatcataaaaattagttaatagaatggcttataggtctaatggctaatagattgaaagaacactgtcaattgaaggcatgcaactatagaacttaaatccataattgcattgtggaagaaggcatgttttcccctgctgcttcatctaaggactgagtacagcctgaattctaggataggctcctcctcagagtcaggatcttccttggataactgactgggtttaggatacccagatggtcttggtaaaattttttgaaactgcacaggagtctggggtgccattatccccccttttctctcctgtctgtctccttctcaaactgccttgtttttaaggccgttgtcagtttctcccaccttctttcatatatacttccctaaaattgtttctgcacacctaattccaccttggtgcctgcctcttggagggcactgaccaacagaattctcccatgtttcttggttaaatacattttcagaaaagagaggcaaggggatgtttaattctcattttccatattcctgtatcatttgaatcttctttttggcttccatatacatgtaaaactcttaatcgttaaaatgtcagcaactgtgtgtaggtagagatcttgggagcattttatatttcttctttatactccccctgggatttataaaaagaaatcaacttagcatttttattatcctcttcccttcttccataacttctaggaaacatttctatcctcttgggcatcaatgcataaagtacctttaaagaaaacttcaaatatgtttacctagtccagagaataatatttattggtaataagttcatggagaaaaaacaaaaccaaaccaggaaatcaatccctggagagcatcccagttgatgcttctgccatttgctgttgccgtttggtgtcactgtggaacaccagctaattgaggcctcgtgaggtcctttttgcattccagaagcttgatggcagccaaggggcagatggctaaacagctggcactccagtaggtacttatgcactgtcacaagtgtagcagggacagaagacagtactacttgcctgacagtcatttttcaaggtgtaaaggaagttgaagccagcctttgacttggctgcactgggcaacagcagctgcctgcttcctccagctttgtgctccctgtgtcctgactcttggttgtcttgttttctagtacactgacatccttttttcctttcttttgccagtcccaaacctttatttttccttctgttccagcgtagacaacatttctacattcaaaagggcaaagaggagatgctgaattgttaatattttaagattgaaagttatatttcctgtttgcctatttttgtttgtcaaaataatagtgtgtgtgttttaagatctttgaaaaggtatgcctaacaaattgtttgacctccggatgctccattgttttcatgcagattaaccaatacacaacttttacgattttcttagtcatggaagctgtcgtgtgacacagtaaactcttttatcaatatatctttacttgcaagtgtttattgcagagagtcattggtctggttttgaggcctctggtttctgctacactattgatgctgagccctcactgggactccttttggatatcctgttgttgccctgtgttgtggggatcttgcagctttggatctgcaggactggtctcttagagattgatttttccttttcttcctctttttctgtccttttttttctcttaaattttatttcattttattttggggagggactgcaagggcagagggtggatatgaagggctggggaaatgaagatgaggtacattatgtgaaagacacaaagagtaaatacaaagcaagttaaaaatggttttttccttagtctttcctttgctttagatattgccaaactagtatatacctgctttggccagtcacaaaatcactcaggtttgctttagaagataatgaagaagctagcaacatctattctcccaggtgtacctcttaccaacacattactctccttaatgtctctgagctcaaggggaatgcaatactgtaacacacccatcttacaggctgtcttttacttctgcttttaccatcaaacagtgaatctgtagctctcaaagtttactgtgatatcccattcatggcaaactttgccagtgagagctgataggtcttcccagggctggagcgagcaggaaaacaattctgtagagactaggcctaacttcttcaacatgccctcattgggaaaaaacgtgcttaattaaagctagagtaattgtacaaacttaaaaactggttatggggtgtcaagttttgctgtcacaaacgagttactagagcagccctagcccagtttatatcttaggccagtgcaaaatcataggttttgattttgattactctttgcttattcaggttgctttttagaagattctgggttgagtatgcttgttatcttcattattataaatgcaatgggttgtactgtgctgtcctccaatgttctgctctctagtagttttggagatggagcctgtaagaagatgatgaagattaataaagtcgggatccaaatgaacaatgcaggtatggtagaagtaatagcagagactccaggaaaaagtgagaaggggagggagatgtcaaatatatatatatatatatatatatatatatatatatatatatatatagagagagagagagagagagagagagagagagtcatttgccactatgcaaagacaatataggaaggatcaatctatgagcctgggaaaaggtcctcccacaaagccaatcctaaccactggaaccgccatcttgtactttcagtctccagaattgtgagaaaacaggttgtctgtgcttaagtcaccttgcagctgccatttcttgatagcagcctgagttgcctaatatataacactaccctgggacagcaaaggtcgtttctgttgccacagtcactcacttctctacaggaatggatgagaattttcagaaataatgatttttgaggaggagaatagaatgtccttcagatactttactacatgttccaacgcctccccaaactcgtcttaataaaagtcaaatgcatatgtatgacaatgaagtgaaccccagcctgcaaaccgaagcactgaaatgccgccctgctttctcacagttttgccaaattgttttgaacaggttagtatcattaaaaacaccccctcccagctctctatagcacatatgcaagctgtatcttcacgggttacacacaccccaatttcactgatatgactgaagcatgctagctgccttgaccacacttgtaattccctgtctggtatctgtgttctcagctgtactttaagctctacagcagaaaactttatatttgctttgctcttgaatttatctctagtaaccaccacagtacctgccaaagaataagtgccccgtgaatatttattgagtgaatggaattgaataaatgaattcctagtccgtcatggactaatttatttgggggctcagccaaactctttgacatcctaattaaatcgacggttctgtacctcctggcaggattattggagatcagacataaagatgtctggattctctctcagtttgggcagcaggcaccattcatcagaagcaaatcacccatgtctgtctccacttcactgcttcataagcttcttctctatgcatcccacacaaatttgtaaaactctttcccctttccttctgttttaagatttttgggctagtggctggtgtcttttaaagttcagtcctagaaaatgaatccaatcaagcaagtctgaagcttgaatggagggactggcagcatatagattcaacccctgccatgatgctattctatgctctatacctcgttagttcagccagatttggaaactcctttgtgaagaatggcaatcagaaatgtaattattttaaaatacagtgcaagatgtggtcacacctcagttgtcctcaagctgtgatcatgtgttgtgtctggtacccttcattaaatgagaatatcttaatctaagaatcagggacgcagggagaactcggcatctagttgcctctctgctttcaaaaacaaaaaagtgggggctggagagatggctcagcattgagtgtgtagtgctcttacatagaatccatactcatttcccagcacccatgacaggaggctcacaacctacaactcccactccagggatcaagcatctctggcctccgagggcacctgaactcaggggcacattacacagacacataactaagacaaagtcaatcttaataaaacattctgtggttgatctggggattggcagtttttctaggttactttgtcacctccactagggttaccttcctaaataagagcttcaagtgagcatgccctgtaaacactgctctaggccattgcctttgcaagagacacagatgggaaaggagcaattgtttttgtttagacaattttaaatcaataatttcttcctttgacgtgaagcctatgctttttacatagcagaagtttgtgtatgtatgtacacatacctgtgtgtgtgtgtgtgtgtgtgtgtgtgtgtgtgtgtgtgtgtatctgtacttgggtgaaattctataggaataagcaaaattatcctgttctttattctgtcactgtctcttccaagctgtgctggggaccctattctttctgtgctatgtgggtgacatttcagcttctgtattttgtttacatgattcctagacataaaaaaattcttggttattattagtcataaagcctcacttgtataatttattttctttttcagtaatagggatccaactcagggctttgcacatgcttgcaatgctctagcatcaggatattgcccatgtcagatgtccattcatgagccatcactaagaatctaatgttactatagttcccatcagctaccttagaagcccctggcttagaagtcttgaaatgaaataaatgtttgtgtttttctctctgtttctcccacttctgtttttttttttttttccagactcccagtaacacctttagaatggcttcaagaggaatgcccataaaagtacagattttacctgtcatggttcagggtaaatggttcccagtttggaagacagatggagtgcttggcttgttcagattaggagcctgtgttatgattgagggtgccttatataaacttcctttagcatggtgatacctttctcttcttagtcattcatagctccccagatatctcagattcctagcctctctccaagtcctctagatgaccttctaagtggcacctttgcaaagttccttctaggataattccgagatgacattttctttctgtgagcctctgatctggtccatgctgagtacgtacacctttctgctagaactgcctttatctaactgtattgcaaatttgaaaactatgccccactggaaagatgcaggcatacagagcttttactttgaaaggttttttagtaagtttgtaggagagaaagtgttcccctttcagtgaagggaagcatctcccccctgtgggccagggagaatacagtccagctgtacttgtcactccaacagctaagcccctttatgtagtagtacccagcaaagggttagctttccaggataccttcccctgttctattgtatcaggtcagagtggctagctcagtgtagtcatctacctcttgggcttttactaatgtgggtctgacatcagactcaactacacacatacacacacacacacacacacacacacacacacacaaacaaacacacacatcatgagagagagagagagagggagagagagagagagagagagagagagagagagagagaaggtcttttatttccacctgcccctctctgcttcctgagatgctatggccagcactatttcttcttcttcttcttcttcttcttcttcttcttcttcttcttcttcttcttcttcttcttcttcttcttcttcttcttcttcttcttcttcaaatagaatgccattgctctcaattctcatattgttcttggacacttcaatgttaattcaattgtatattttgggtcatctacttttctaaacagaggtcaactggtctgagatatggacatacttatcacttgctggtttgttcctagatttttttgtgtcttatctaaaaaaatactaaaaatcattctatatcattgtctttgttcattcatataaacactatgtatctgtggtgcttctgaacaactcaacattctctctcatctacattcaactgctcaaatatttgaggaaaggtgttatattttctataccatcaagttctctttcattacccaatcctcaagaatggcaggagctttcagacccatctccatcctgattttactcttcaggtcatatgctaatttgtcacagtccttaaaattttgacctgtgattgaacataatactccagatgtggtttgatcagaatatagaaagacgattacttcccataaaccagaaattacacttttattaatgcagtctaagatctttggctttttagcagccacatcacactgaattgaattacaggagttgactgtaattcaaaataatatccaatttaaagtgagtgctattcccctgccagctggataaggtttcccatttaaatggagcatttaagccaaaacgaggttaatatgtgaccggaggtggcattagaccaccaaagcatgttgtgttccaaattggttgactaataagtgtctcaaatctgaccaaggaaaactggacctgtcaactgccctgactccttgtcaacagaaggagaaatgtgcatcggtgctaccaataaaccagccatttttcaaaattagtccagtcattttgtctgtaggaatctagcaatttattacaaaacttcctctgtgtagatgatagtcccatatttacaatcaaatccccttaatatttacgagcagtttccaattgtaaaatacgtgatcattgaggaaatttttggacatgctgtaaagtatgaagatgaaagtgattccgggtttccatgtcagcttttgttagtgtccctgatttgtcactgaaatctctttaggtggaaggagacagtcactgaaaccaacactgctttgacatcaccgattttagtagccacaggtaaatcacagagctgctggtgtcttcagctagaaagtactatccagaataatgccatgggagtctacacatctacacacacacacacacacacacacacacacacacacacacacacacacacacacacacacgatatatatgagtattggcacatgattcaatttcctgaatttcttacagttttacaaagggtttcttgaattctgtgggtgttttaaggcaatactcgtgtgtttgatataagtagctccatatgcctggataatggcagagactggaaacacacaggctgcccacacacaattttcagtggtaatatgcaaccgaaactgtcaaaagttggagaagtaattgttgatgtgttgactatattttactatagttttgatgtgttagtgattataatggaaagggtacatttctaaagtatgggtttctgattgacaccaccaatgtcctcagcagtgctagcataatataagcatatcttcagtctcactcattggagggcagtcccggcctgtgtgtccttaaaaacacaaacacggtttcaaactggtgaatgaagcatccctctcttggtctgaataaaatatgttaagaagagcaacaggaatctaattgttgatagtgatcttccacatgggtagcacttgagtaaaatacatttggaggccaggaggttgtgattattgcttagtcatcaactcttcaattgaattaggctttattttttatttttcttgccttttaaggtataattaaagcttgatgtcaaatctcacttgagttttcatcaataacatccacttaaccactttcaagaaggaagcctgcctttggggctcaggcagggatactacaattcacaactttgctatataaatgaccaggaaaagcactccctggtcaacaaggattcactcttcttgttggtgggtgtgtcaggggagggtgggtattaaatctccagcacaaagggcatgtctttgtccaggtaaatataaataatttacatttagaattggctttcttcatgtgtaggtcaagtgggctgtctaagaaatcagtcttttctcttacattatattagaagcagaatagcagagcttccactgagaaagcttcctgccaggctgacactggaaaaggaagcactcagaggcacccccaatagccatagtgattgccaaaatgcagattgcatggaaaacatgccaagtaagctattattgtcaatattgctccattacatacaatgcaaaatagtcccttacttaactgtttttattgatcttctcaacaaccttgagttctatcacttctgcttttcacaaaagaaactgacaccaggagaaattaaatggcaacatgatggaatctaaacttgaatacaagacttttactttttatctgtattcctctcagtgtccttcaggggttgaaatgcctttatgtcctctccattctcataagaagccagggaggtaattatagttgagatcaacggtaaactggggaaggctctgccccccttgtaatcccaggcaccccaggtgagagagaggtgaaggcacaaagtcaagcctagcttgggctatatggcaagaaacctctgcagacaaacaaaacaagctcaagtggtggaaacactcatctccctcatagaaatggggaacgtcagaactggcaacctttcacatagaagggtagaggcaaattcagtgtctaattttagatcagcaatgaagttagaatgaaatttgacaaataaattacaacttgactataagtagagcaggttatggtagaatatgtgttttaattttctaggaattataagataagcatgcatgcatttatttctttgaaatagagttcatctagtgcagaaatgtgtaaaatatgaattatccctgtcctactctcatgcccacttattcttaaattataatcatgttaattatgtctgatactacttagtatgatccttgtcactgttaccatgctgtataaatcatatacctacttttagcctcattaatttacaaatgtaaagattttgtttaagttgtactacaaaagattagcaactagccaggtgtgacagtacacacctataatcctagcattcaggagctgaaacaggaggatcttgtgttggagcagcaaacttggactatggtgtaaacctaatttttttttttaaaaaggatatgtaaactaccacctaaattgttcaatttttgtcctcttaattctaatatatatatatatatatatatatatatatatatatatatatatatatatatatatatatatatatatatatatatcatagactcaaatcatttgattctaattttctttcagataccaatatacctggttaccaatcatatgagactgaatcaaaccagtagagtttatgaatgaagccttcatctcagggtaaaggaaagagtgtgaaattttgacaagaagtcttaccccaaagctatctccaatttagtctattaaaatatggcaaaatgttaacctgcatatatttaggaaatatcctttataataagaaacttccatgtttgattgctaaaatttagaattattttctaaattagatttcatcagtaaagcagacaggtctaccttgtgagtatatttaggtaaacatgtcacattgaacaagaacaaaagttattggccagtaagacttgacctagaaatgataaaagagtggaaggaattgttggagtcatgagacatggcccttggtaggtgttcagaagcatctgaataaagaacagcaaccaaacagcccatgatcatgacggtaattctcatggcagaaagcaccatgcctgcaaggtctcagccatcttagcatgtcttgtgctctcctcccatgggcaggtttgtgaacagcacacataaaccaagtgttcttgaaccaacattgatttgcctgttcaacttgcaaactctgtgaaggaaatgtgagcgtgagaaattgaggagccagttttcctgcaagttcctatgaactagaacaagatgctagagatttgctctgtccctgcctttgtttcagagctcacatctagagtgcagtctgtctcagaatgactcagcgtttgagtctcactgcactggatttagataatatttctctgagactttagacttttgagtttatgctgcaatgagttaagacagtgggggtcttaggaagggatgaatggaatttgtctataagaaaaatatgacttactggtgggtgatagctgttatgaaattctgtggtatgaatacctgtgatacttcaacaagtgttgaataccaacaagtatgaatacctgtgatccctcaaccctcacatggtgtatttgatggtgggttgtgggaggtgaagagcatgaaagatgtagaagatcattggtgggtaggaactgttctcttatgaaaaatcctccagagaagatccatctccctaaagacatagaaagtatatagagaatatatgcagaagtggggtttccaaagataacaaatctacattgattctcaactttttttccccccagagacatgaaaaataaatttgtttcttccaaattaccaagtccatgatactttgattcagtatcccagatgcactagggtagacatgctcacaaaagtgcgtgcacacacataacaaccatttctttataattgctttcagagaaatgagttatggccaagattctattcttttgtttcctaccttcgctagtagaattgacacgggagcttccctgagggtgtcagtgtcctctactttgaaaaagacacatgacctcaaaattagaagcaaacttttgaccaatacaaatttaaatatttagacattacttttggtcaatgaaaacaagatattttaacacagaaaaatgttttcatcttatgcatgaaaactcacattccctgaaagtgtcataagcaaatgtggaattaagggtgagatcagtcccacattcaaactagttgtctctgtttgtaacctatttttccttctctattgaaatgtgtgttagtatatgtgaggttatattgaacagagtgttggtgtttcatcattacctttaaggatggagctctacaagtattttaataaggaagggataaattatatcacttttgttgtagcaagtgtcatcaaatatgttttatcatcaaatgccttactgtctcataatatagagtcttcaagtagaacttctgggcagtaaaaatttccaagaaatgcaataattaatattttgaaactcaacatccaaaaagcaatttgataaacataaccaatagaagacaatgttccattaaataaaccaagtgttgctataaatttgtgtaagtctcaagttcctttcctgggatgtcttagaaattttcttctatttttttaactaacttagaaaagaaatggaaatagatactgtcttttaatatatggcacagcgtgtgttttcttctaatttgggcatggcacatttcatttacatagctttaagatttttggaatgattatgaaagtaacaccacaagtaaccacaattattcagagacattttgattcatcctggttcttatcacaactttcatatgtaagaaagctgtagacttgggtgagaatgatttatccatatagaggtgatggatggcatgtgtctactgggcataaatatataatttctgtcttggtgatgatgtcatatgctatgctctactgactgcagaattgccataacacatgtctattctcacagtgcagacacacaaaagtagccattcttcagctgtttttttttaatatataataatcctctctgaagcttgagggtaactttttcatggatgtaacttttcaatttttaaaattttgaagcctctcactactaactgcaaacaacacctaatcactcctctgatttctgtcaactcccaccatacacctgctgatttatcatcaaccgatagaaataactatgaaattcactaataggtatatgttatttttattaccatgtttagttgataggaaagcccctatttattaaaacttgtatacattttaaaataaaattataatagacaaataaaataaggaccctaaatacttgtatacatttatatattttgcatttagggtatgtatatgtgtatatatatgaggaagtatgtatgtaggtattttgtatgggtatgtatgtgcatactacagcatgtgtatagagatcagggaacaattttggagactcagttctctcctactaccacgtgggtccaggatattgaattctagtaatcggccttggcagcaagcacttttacccactgagccttctggcatggccccaggttacatattttaaacacctctctaaatctattctaatatggttatgtgtgcataacagggcaactaggtaagtttctaatgtaggactagacattctaagatgtttctgatctgcatgccctgttgtctgcctcaagtgtggctctgaaaagatcacagctaagaaggggaattgatgatatttacaggggcagaaagcattggctttcttctgctgtgtacagaaaacagaatttgactctgtgaacactatttgggaagcgagtaacttgagagtaggaaagcatcaaataggcatgtgttagacatttagaaaaggctgcctgagtcggtgagtgatgtgtgtataaaacaaatccatgcaattaattttgagaagtttgagataaggggtgaccctgtggaaagaaagtctgtaactcaggtattctaagtaataaaacttccagtcatcttattctcacttaatgtccatgaacaaaatattaccatattaatattctaaggagagagaaaaaacataacaggtaaaaatatgtatccttagttggggtatgtgaattaggatcacacccttgataaaggttaattttataagctaatgggtgagcttcaagatgtttgcattctttaagttttctctcaggtaatgaagcatcacaaagatggacttctccagggatgtactctacctacacaaaactccaagtatcatagatgccaagatttactggaggatttatgtttgatactttagcatagcttgtcttcttttgattttatttttctataacagatcaataaattttatctgagaaataaagcaattctgtggaaatcaatctctgatgctgatttattctgagtggttggtgtccaggagtgggagatagataattcaaaagctctgtctgcaatttatctgccaatggggtcttgaagcctggccagacaaaaattgtatctaatcctcctctttacctcatccccagagagtcttcattctgctggtccatggcggtgatctgggtggttagcattcgggaagaggagattagagaaagaaggaagaagagggtagtgggaaagagagaggaaagagggcagggccaatagaggggaagaaattagagccagagaaaatcttgacttggtctgatgagaaccaatgtttgctgtgaatgttagggtaaatgtttcctatcagaatgaaagaagcaatgatggcgggttagcaaaaggtcttagttcattaaaggaaatgtggtaattttctcaactgaggtggaagctcacaggagggagtttcataaacaatcccaatgtgtggctttgcaactgtcttttgcagccactaacatttttaatatggcggggaaatgcagggtaatataacagtcttcttcttttcatcttctctttcaatacacacgtatgtaaacacgcaggtacataagcacaccaggcagatctttagtggttaagccttcagacttcattttctctggggacacattttaaaataataataattggtacaaaaaaaaccccacaggtcagactggcaaaaggaatggccctttaaagggcttttatctcctgcccatcatctcaaattgtcttgtttacccctctgaatccctatcaggcaccattactgcactcagtgtccacagcactcttgtgaagggaaaattaattctgaattactggtcccataactgcctgctttttcacattatctgtcaggaaaataagcagacaatagccagctaagtggatttctgctagctgccattcaaagaagaaggaacaggtgttcaatgggggcttctttctttcctcaactgctatttaacaatacagagaggaggagtttaattgcctgctcccacctgcccccttgtcatttcttagttttattggttttaatgaaaatattaagtgcactctaggaacagtggcaaagtgacattttgattgaaacacacaaggaaaaatgtctaacagaagcaggcactgttacaatgctaatagaaactgaaggggagaatatctagagcaacatttcacctattgttatacaaatagttggtccttagaaagaggacttaaaaaatgaatgctgttaagagcactttgccttagctactgaacttttaatttttccatagaaaaataatgtgtccaggccatgatgcattttctctcattagatgtcccagagttggcatcagctgttgtataaatatggcttgttcctaccaaagcacatagtgaggtttggtcctcatattagctgtgttgagaaggagtggcaatttcagaggtgattaatttttaaatggattagcatttttttctggctggtattcaactaggcatgttatcctgagagtgagtctttatctcacacatcaagcgcctctatcccgcattcactcactttgtttttcttttatgaaggttttccagaagctagatttgtaaaccatgattccactcagctacttattcttgtaagttaccaggtctcaggcattctgttgtagaacagaagggagcatctgtgttcaactactgttgaaatatctttctgttctctgggattgcaatgcatggagttttgatggaggatgtccttctgcatatatgtttctcttaatggttgattaataaaacactatctggccaatgaggcaagaagataggcaggactaggatgaggagaattttgggaaagataggcagagagagcccatcaaagaacagttgccatgtagcccaaaaggagtagcacatccgaacccttctccagtaagataagaccacatggaaatacatagattaatagaaatgagttaataattaaaacggagatagccaataaaaaaaaagccctagtctttggctaacagtttaataattaatgtaagtctttgtttgtttatttggggctgagaaaggcagcaggaccaggcctgacaagaaattccagcaacagagtttctggagagagttttaatttattgacatgattcattgcgtctgagcctcttaagcagaaatcagaagtgtgtttgcctgagcccacatggggtggggggtaggttggaggtgggggagaaggaatgggggtaaggggagggagagggagaggggaattacatgtgaaacaagcccgttccctaacttgaattaataataataataaaaaaaagtagaaaaggaaaaaaagccaagtgaaaagtctgcttagcagttctcagttcatgcagtgactttgacattggttgtatttcagtctacttcatgacagcactaacatgaataatgaatatgaaatgaagaccactgtgttcaagatacatgcatgcacacacatgcacaaattaccctgtagaatgtaaacttctagtaaaaaaaaagttaaatataatcataaatgctgcatcttttgtttcaaatttcaagtatttcagtggtcattgagtgcaaagagaacaacatggccttcatcaagaaagttcctgatgtatataccattgaaaatgataacgaacaaccttttctgcaggcagaagttctctattcctccatgatttaaaaatgagaactctgaacatagtataatgttaaaagctaacatagaaatccaaagaacacttgccatatacttgtgtatcttgggattatcccagatattttttttctggcatacaaataaatgatcaacaaataagagtccttgtccatataaggctactttaactatgagttacacactatccatttaaaagggtcttaaatacatagatcatcctttgacttactaataagatattctgaatcaggggagttccacatgtagtacaatgattcactggaattgagttcagaaccttgagcatgttaggcaaagcactttgtttttgagctacagcacctgccccgagaagctgaaatagtaagatattcttgaatttcttttccttctgtctgttgcttttgagttgttaagcttaactgtttccactatgaataggctacaaaacaagaaatcaaaatgcttcttttttgaaagggaaattccagacagtcaaggccccactgcctgacctaagtcacacatacattgcttatcatattctttttttagtttttactttttattgattatttgtggatttcacatcatacttcccaatcccaagatttcatggtcccacccatctcttcctctgcttgcttcctccatcaaccttgcaatctcccccagaaaacaaaacaaaacttaaaagtgaaaataaaacacaaaacaaacaagcaaacaagcaaaaatgagagagagagacagagagacagagagagacagagagagagacagagaaggaatgaaggaaggaaggaaggaaggaaggaaggaaggaagaaaggagagaaggaaggaaggaagatctcagcttggaggttgtaggccaaatgagtcacacaatatacctttggtccaaacatctttactagtaagctttattacaatgagtctttggtcttgttctagcttttggcttctgctatgctattgatgatgggccctcactgggaatccccttggatatcctgttgttgccttgtgttatggagatcctgtaactttgttatctgtaggttcggccccttcacatgctccagcagttcatagatgaggtggatgttgaggtgggctgactcatagccctgggaggtagccgggttggtcatcccctccagtttcccctcattgtcatctcttgggtgagctctccaacactgccctggctagcacacccaatgcagcaggcagcaaggagctacgccagttctcctgctctcatgccctcagtcaggctcacccacactcacaccaccaggaccagccctactgttttgcccaggcatatttccctcacacatgccaccacatggcagaggaggggaggggcagggttagctttcctgctcttccacccagcttatccaatacttgacaaagtttagtattttacatcatttgtttagagcagtcatgactcatgggctaggccagtggtgtagccaatatgtttgcttaatactctactgtctaggtgatttatttaagctagctgtcttgtctactctctgccatgaaaacacccttaccattgctgatttgaaactatcaacatgactaccaaatcagagttagacaacccaggaacggttgattcctacatgtcatacagaactatctttagcacaccgccaagttaaaatcactttccctaagcctacctccactcaatacccagaataaaatagggttatgttagagagaaagaggaagaaattgatgctgtgcatgatacctacaacgttggccacagtgctgtgtctatgtactcagcatgtaaattaggtgctctagaggttttggtcagtaagaaatttgtttatatcccttttggagacaatctgatcaaccctgtagccactcctggtctagaagtgagcagtgtatcattctcttctaattagcctgaatgggatagctgtacacacactggtcatgggatactgcacagagaagagctatggaagccagattactctattatcaggttgaagttactgatcagcatctatgtcttgctgaattaaagcaaatgggatgcatatgatatgaataaccacagaaagtagaaaaacagggagaatcaataaggtcacaaaaacatggacagaatgttgccagacttttaaaattgtgatgttaggggcattggcatttagacaagtgttctaccactgatgtatgctctagctctgaccttaatttgtgattttcaaaatcatgtcttcttgaggtccaactgtttctcacttgctgcccttcatttcatacattattatgaaaatcactattttattgtctccattatttagaattttaaattattttttaactttaatgtgctctaactccttacaggaaaaaaaatcttaattcgatcagaattcaaaggggagcacgaattacttagtaaattcaagatctaacagtagagccatacaaatgaatcaacatgcaactgctttccattgggaaggcaattcatgtaacaagaattacagacaatgggagctcacctttggccaagcactgtagcaagtcatgttaaaacgccattaggctcatcttgacttggtgtgccatcccaagaggcttacccactctcatcccaagatgatgtttctaagagccaagtttttgaaccagctgaacttctattgcttcatagttcaggttcttgtctgtttgatactgttgcccccagaaaagatgatagacaagtaaatgtgaaagtcaaggtagatattctcaatactaaaggaagaccctacatatagaacacatttgtgcaaggaccactaaggaatgaaaaagatgtcattatgttctctaatgatcatctgaagaattcagttgttgcatacacaataaaacaaatggtaaaagaaaaaaatcagaactaaactcatctaaagaacctgcatttgcaatgtattttagtgggggggggtctgtatcatgtaggtacatatgagtctccatgagcacagtgctctgtttgaaggggatttgggcacctgattacacttttttaatgaataggagctatatacactatagttttgagacagataaagatatttttcggttaaaatacaaaagaataggtcctatatttaatgaaacctctatcctgcctactttctatctctgcctttatcattgtctttcacttcctaaatcaattctaaattatacaattccatccgattatcttcagctcaaccactgtcagttcaattggttaaggggcttcttcgtctctgctttagtggtcttgctaactgcttcaggtcctgcaactgcatcttctgcctccagtttctttgagctgtctctactccacttataaatgagagagactgccgatacaaagtggcagaaatcacataaatgtatttcattttatagtgaaaatggaaaatatatcatgatgagcataagagttgtgtcttagcacctccagatttgtagtagggtagataatgttttatacattgtccaaagtagaagtaattcatagtgatcaaaaataacaaatctgtgctttttaagtttgggccatgggtcactagctttaagattagggatggagaccccctgaaggtaagagttctgtggtacatttcagacttgtccattcacaataactgggatgtcaatctggagtccggaatctgaaacattgcagagtgcctgtgtggtcctgatgtgggataagacatgaaaaaaaagactcattgccatgatacttccagggaaattggtaaaaaagtaaaatttgtaacgtgagtctaccataaacatcccttttaccttttcttgtttccttttgactctcccttgagcctgatcatctgcattaaaatgttgaaatagtatacactatcaactagaagaggctaatttacataaacaaatcatccctttaacatcagtggcttagaaaaacacaattttcttttgaaacatgtttcatgcctagtgtgggttgtctggaatcttattactgctctagaacaaaatgccagagtgcttccctcatggcctctgtgaggccccttcatggagagaagaaaagcttctgagtgttatcagtaggagtcaagaatatttcttgacagccactccttcttatattctaattaactgtcccaaccaagtgctaggcccaaagcacaatcctactctcacttgtggaagggaaagagaaaagtccgagaattaacaacccagtggacacactgaaacattcacttcactggagcctttaaaacaacacaaaatcagacaggcttgtttccctttgctcatgtcacagggaaaataaagttcaaacattgaaaattatagttcaggccaaggtgaatacagtttaatctcattattgactacagttaatttatacagtctccaaaacaatgagtttgtgaatgctgtaatattgctcccacgggaaatgggtttaggtctctgtgtgcctcaagtagggacattttccttagtcagacaagttatagccctattcaggtgtgattacaaatattatccatttgtgagcattaataaacttgtgacccagcacactctgactgaacagagtacagatttcatgtgcctgggaacattaagcactgagctggggctcaggagtgcttgcataactagaaaaaccctacagaataaatacaaaatgtgaaatgtagtaggactatagacaggatgcttggtgatggtgtgagagctgaagcaggaaaactgagtgagagtcactaactctgcctccactgagatttgtgaatcaggcaactcaagttttgtccctttgcttgtactacaatgaccatggaaatattgtggatattggcataggagcaacagctaaacttgaggaagaaggaaaatatataaatatggaaacagtgtgaattgactatacagactgtaaaagaaaaagaaaaacaattttttcctctcatactcaacacagtgattccagatgtatgagcatattaaacagctctccagtggacaccactctaccctctagacatcagctcaattctgacatgactttggagaagtaaagacagctctatagtgtgggggttcatttctcaagagctctcctttggactaccatgcacataaagggttgccacctatactgatcaattgatcaattctccattaacttggctttccatgacttcattctcaggtttaattttctggaacagcttgaagaaccctaggaaaataattttcttacttttccagttctgtttatgttcttttgataaagtactctggccaaaagcaacttaggagacaaaagggtttatttcatcttataggttacattacataatgatggttaagtcaggcaagagcttaagcagaaacttgaagcaagaaccatggtgggatgatgcttgctggttcctttgcaggcctatacttagataacttccctgtagagcctaggaatggtgctgcttacagtgggctagtaactcttgcatctattaaccatcaaggaaaatccccatagacaggcccataggccaatctgatctaggaaattcctctctcagatgactctagactgtgttgacagtcaatgctaactaggacacttacagttaccatttatgaagcacaatattacaaaggatcccctaaaagagccaaatgaaaaaagagtacataggacaaggcaccccagaatgttcatagacctttcatgtacttcaaagatgtagctgcctctaaagactcttcagaccttccctgccctttggaatttacaaagagttactacattagagtttgtgcatttctttacactctcctcacttgaggtcctggggtggtgccaaaatttaaaataccctaattacacagttggttcctttggcaattagattcaataatgaggccatccaggatcctctaagaactggctccttagaacaaataatgctcctattatcaaggaaattcccaagaagttagaaaactgtatcagacagttccctctcttaggaaattgttacaagagtctcaggaaccagtattcaggaacggggtaaaatctaaatattagtttataacgttgaaatttggagaaataaaatctatgaccagtgttatattccaagtcctgagaacatgtttctgataccacaatatcaatatcatactttatactgagtgtgtctgccataattcttgatttctagaatgtgcttttgaactatagattagcttggtcatccttataactttcatatgagaaggtaaatttccttttttctttgaaaatttcaactttgatttttcagtctaatctgctttcaatacacggttctaccaaatagtttaagacctctgaatgtcaggttcatcatttatacatggaaataaataataccaaaggttgggatgccattggtaaagtaaatcagtggacaatataagacatccactatgttacctagcctgttaggaggtttagtcatgaggtaactgctctaatctctattagagtgaccaacacagaaaaataactagatcctgtgaatttattgtagatatatataatgcaactcatttactgaaaattcattgctttaatcactcactcagttttaacatttagtggatacatatacaacatgtcaaatattaaaaggaacaaaaagaaacattctcaaaatcacatgaatatagaaatgcatatttgctgaagataaggctaactgataaggttataaagtctatgaaaggggggttaaaactcagataaaattcttaaagacttttaaaagtgatgtatatttttctgagcaactgccatactgatttccaaaatgagttataagtttgcactcccaccagcaatggaggagtgttcctttttctccacatcctctccagcatagattgtcattggtatttttgattttagccattctagcctgtgtaagatggtatctcagagttgttttgagttgcatttctctgatggccaaggattttgagcactttcttaagtgtctttcagccatttcaaatttctctgttgagaattctctatttagttctacaccccactttttaatttcattgtttggtgtcttggtggctagcttcttaagttcattgtatattttggaaatcagccctctgtcagatgaggggttggtgaagatcttttcccattctgtgggctgtcgttttgtctgtctacctcaagatccagcaattcctctcttgggcatatacccaaataatgcatgttcatacaacaagggcatatgttcaaccatgttcatagcagcattgtctgtaatagccagaacctggaagcaaacttgatgcccctcaactgaagattggatagagaaaatgtggtatatttatacaatggagtactactcagcagaaaaaaacaatggaatctagaaatttgaaggctaatggatggaactagaagaaaccaccctgagtgagttaacccagtcacaaaaaaagacaaacataagccctcatccagtggctgatggaagcagaggcagacacccacagatatacactgaactgaactctggaacctagttgcagagaaggagggatgaagatcaaaggggttggtaccaggctggtgaaacccacagaaacagctggcctgaacgagggggaacacatggaccccagcctgctgtctgggaggccagcacaggcctgatccagaccctgaacatggatgtcaattaggtggcctctgcactctagggggcccctagtagtggattagtatttttccctggtgtaagaagggactttgagagcccatcccatgtgaagggatgcactcttggcctgtacacatgggggagggcctaggccctgtccaagatcatgtggtggactttggggagccaccgtcaagggccctaccctgcctggggagtgggcaagtggggggctggggggagggttgggaggaggggagggagagggagaagggattgacatttgaagcaagcttgttcctaatttgaactaataaaaaaaaataaagagttaaaaaaacagtgatgtatatacacatatgtgtttatgtaagtgcaggtgcccacagagttcagaaagctcctactgattttctggagtaggagctacaggtgcttatgagccacacaacataggtgctgaacacccactgcagtcctgtccaagagcagtacactttaagtctgagccacctctccagcccagctaaaataaactctctggagatactagaatctagcacataaggaaaatgtaaaattgtgttggtaaaaattttgtatgttcaagagtgttgaagaaaaaggcaatatgcacattttgagaagctcaagcatttcgttaccttcagaacctagagctgaatgtcatacgaggaagttgtgatgctgagaccaatatcaaagaaaacaagtgttaaaactgagactgggatcttatactttgcatttctgacaatctctgataacagaagatcacttagagaaacaatattaaaagaagagagaccattcatcaagccatttctttaggtaacggtcaaggtgataggaaactagacagtggcatgcacgtaagtgaaggctcaccaatattaggaaaaagaggaccttttaactaaggtacacttggtagagacacaaaagcaggtgagaaccagaaacacctcctttaggaagaatggaaggcatcacatctctaccaggagactgtcagggcaggaaaactggaggccagctactaaaagtggggtagcttgtgaaacatttaaggtgcctctttggccctctctagattgttctgtgtttgaattagtggacgaaaattatgaaaaattcctgcgtgcttcaaagtagcaagttctagtttatatgagccactagttatatgggttgtttgtcatcacagtctacttgctaacgatggtattccaactccaggactagttactagagttagtaaacttacttccatgtctgcatactaatgatactagccagaatgcctgggcaatttgttatacatagtgaacaaacttcctttaagtgttgttatagatggtagtctgggttcctgtgctagttgtaataccaagtagaccgacttcttgtgctggttattgtggataacaggtgattgtcctggaatgatggctatatttaggagactgagaaactaatatgattgcaaagatggtagactgacttcatgagctgattgctgtagaatctgcagtgaagataatagactgacttcctggcatagttgatatagatggtcgattgaatgcctgggctgattgctgaagatagtacattgattttctgccttagttaatgcacatagtaaattgacctcctagatatatagacaaacttcctaggacagatgataggtgtaatacactgacttattagaacagtagttagagatagtatactaaggacccagactcatggctatagtctataaattggcttcctgggatgggtggttttgtcaattacacaacctaggaggagagtctcaatgacaaactagattaggttggcctgtgagcatatctgatggggtatgaggggtcttaatcacattaattaaggtgggaagacttaactagtatgggtggaaccatcgcttaggcgggagatcctgtactacataagaatgaaaaaagcaagctgagcaacagcatgtatctgttaatttactgctctctgttctttcctgtgggtgtgactagctccttaaagttcctgacacctttgcttgcccacaatgatggactgcaatgagccaaataaacccttcctatcttttgtgaaggtattttatcacacctacaagaaacaaaactaaaactgctgctgtagatagcagagcaacttcctatgctggactctacagatagtagactgacttcttttgtttgtttgcttgttgctttgtataataggctgatttccagggatggttactatagatacaggaattgataaagtggagcatcttttatttagttgaactgcttgaacttgtgtacttatcattttagcaaaaagttacttcttcatcccttctacccatgccatttgatgcagttgttttccttattctgtcttaaaaaattgttagcaatttgatttgaagcaatgaattaactaaagtttctgatttgattctgagtaaaataaatgaatgtttgaagagtcaaaattgttagcagggaaggaagtctgcatctatgctcaccagagtagagactgatgacgtgaaaaaaagaaaggaaatgagtgggggaaaggaaggaattgaaggaaactttcaacagattgtttcaaaatgtcaagagcaaaatatttttgctgcctcacatagagtcatttccagccagtaagggcaaaggagtcaagaagctgcttgcctctggccaagtcccaagtcccttttgcccactggctcttaacttacctgatccagcttgactctttgaagtttctagttgaatcacacctgaagaaacaccttaagatgccccatgaataagtaactccctttaccccagaattgctttctctcagaaaatggttgtgggacatgtggtttggacttagtattttcctgtttccccatgataaataggactttaaagaagaaaaatctttgaaggatataatatatatatatatatatatatatatatatatattatattctactgtgcctggtattttacctggattctggggatctgaacatatatatatatatatatatatatatatatatatatatatccttgaaaataaaacttccacttcactggtcttttggagctgtgaggaaaagcttcatgcagtctttctggggaaaacaccaatcctctaccataaggtagaactcatactgaagtgactatagtgcccacaattgtttattaattggcaatatgcaataatatccacagttgttgggcttaaacactgctggtcttcatggcttaaccaaagcagaccccctccaaataaaccaagagagtaaagacctcatttctagtaaccagccactgatccccaaaataagatctgtagaacatgctgggacagaggactgcagacagctatgatactcctactgtttacaaaatagtaggtgacatcacatgagatcccaactctgaacaccctactgccccaccaagaaaagtgctttaggcaccctttttgtattacatttttatttattattttctttcatttattttacattctgactgcaatttcccttccctcaatgtcttagtcactgctatattgctgtgaagagacgccatgatgtagacaactctcataaaagaaagtgcttgattgggggatggataaccttttgagtggcttagtccattatcagcatggcaggtagcctggtgctggagaagtacccgagagctacgtcttaatccacaagcagagaggcagagaaagactgggcttggcatgggcttttggagcctaaaagtccatcctcaggaacaaacttcctccaataagcgaaaccttctccaacaagaccgatcccactaatccttataattctttcaaacagtttcactctctggtgaccaagcattcaagtatataaacctctatattcaaaccgtcacatcgggtaaggtgagtatctttggtaccttatttccaagatagggtgtttcactgaacctggagttcactgattgagcaagcctagcttggcaacaaacttcaatagccctgtagtacaatgattttcaacctgtgggtcgtgatccctttggggttgaatgacctctatatcgggtcagagaaacacagtaattaaattccaattacaattatgaagtagcaacaaaaataattttatgatgtgggtcattacaacctgaggaactgtattaatggattctagtgtattcctctccagcacaagaattacagattctactgtgcctggtattttacctggattctggggatctgaactcaggtcctcatacttacaaggcaagaatttcctgacttatccatctctctagcctccaatgatattttaaaaattaggtaggcatctcacagaaatcactagtccaggtctaatttcacctgaactggaatagaaagaagattgtgagttttccagagtataatattatttgtgaattctggctttaaatacatgtttatctatctaggctttggttattaatttttcagagaattaattctttttcttggttctaccaaagcaaacctgaaaatagacattgaaattccagaggccctgcccattctcaccttcagcttcaataacttgtctgaagggctcccagatgaaaccagcaaggaaagggacatgtgagcaaggccggagaatgttccagacatgagtttccatgaattgaatggcagtactcactgctcccaccattgctgtgggcagtggacatggaatagtgcccaccaaggaaaatcacccacaccttagtgtccagggtttatgttctggatggccttataaacagggctaactgcccatgaggctgactttagtctccaccttctctggagctcagcattctatccccacacccatcactttgctctagctaccatggtctagtgtcatttctttaaaaaaataaataaataactttatttatttttcatcccagctgcagtttcccctctgctctcctcccagtcatcccctctataccccctctatttccatcccccaatccattcctcctctgtttctatttagaaaaggggtagatatcccatgagtatcaacaaaacatggcatatcaagcatcagtaagactaagcactttcccatgtattaaggctgagcaagatgagaagtagtatgaggagtaggttccagaaagactgtaaaagcatcgatgacagttcctgttcccactattagaagtcccacagaggaccattgtaaaacatatgcagagtgcctaactcagtaccatgcatgcttcctggttgtagacttataggtcacctctcagaaataagggaagagagccaagttgaccttggagcaagggcaattcatttttactgagtaactggaatccttaccaactccctgtgtaaggttcactctgattatgtctcccttcaaatgatttattctgtgtcttggaaattatattgtattttaattcattctagactattttctaacttctacattaaatcacaagtgcaggtccacctggaatgggtaagttattgggtcaaacctcatctccattattctctcatcccattccactatgcaaggatttaattgttttcaatatttaagtattttcagtacctaaaattattaatcatcatgaattacattttctgtaaatatctaaccttctgcacttttagcggtgaagattatggctctggagtgtagacactggaaacttctttgtatttttgtactccatatggaattctgagaaatagccactggtgagaaatagccatttactctctgtgtcatttgaaacattctcctcagaagacagctccaaagtattcttctcaagaaaataccttctgtgaatatctagatttcctgatcacttgtccttctcataggaaacaggtcagaacaaatatgtctgagtctacacacacacacacacacacacacacacacacacacacacattgttttgaatattctgttattcatctacttgctttaaaaaagatgtatttactctgtgtgagtacatacatatgtgtgtgcatatgtatgtgtgggtgtgggtgtgagtacatgtgagtacacgtctaccagagcacatgtaaattttctgaagtcagttctcatatcttgagtcgtgtgtgtgtgtgtgtgtgtgtgtgtgtgtgtgtgtgtgtgtgtgtgtgtctgtgtgtgtgtgtgtgtgctcctctctctgtttttctctccctgatttccttactcttcatttatttctgaaaaatattaggcaaatctttctcttcagactctagagccaccaagaaaacaaaagaagatatgactcaagccacagtgaatcttctctgctttgtgtaaaacaacctccagacatttttcctggttgttcagttaaagacacaactgctagaaaagattcatcctttttgagtctattcccttctatttcctttcaactatatgtcctcccctacagcagcaacagagtcccaaaacctcaggctgcaagttaaaagccattccagtagaagtggtgaagtttaaacttagcactgtactataatcactaagaaacaatcacattcatttatgttaggtggaaattcccacataattgccatcaaaggaatcaacatgggaacctgtggagcagtgttaacttatattttaagtttgcttttgtttctgttgagacagggtctcatgtatcctagatctcaggttggcattgaactcatagcatagcaaaggatgatcttaaacttttgattatcttgccttcaccttctgagtgatggtatttaaaacatgccccaccttgatcagttaatgtggtcctgggattgaagccagggcttcagacacagtgagcaagcaacccaactactggctgcatcccaggctctgagtagagataacttagaagattccagagaggttcttcttgcctgcttccttgcatcagttatccctctttgagtcacctattcttcacctttggtatcaaacactccatcctcaccagaagactgatagctcactcagactgactgtcactgagtctctcttcctgtgggcctaccacatatgtagggaaagtttgctgaaggtttcttctggaaaatcaacctacatatagatctctttattgaaatgcacttttaaaagcatatttaaagtttggcactagaaactcttgcctacctgttattctgtcgaggaactttttaagggattcctgttactaactaataaatttcagactcctcatcctggtagctggaataatctgctgctaacctaacttttccaactacattttccacttctccatatgttccccttatgtgtttgccaggtgacatagtctctgtagatataccttgactgcagaggacaagttagacttccaaacccaaccaatactttaactccatctcaaataatatctttcccagagaaatctgattgctcccatagccctgtaactatactctttcacagtgttcccccccaatacccctacttttctttattgtatttatttttgggttttgttgtcgttttccccaagataggattgctctgtgtatccctggctgtcctgggatttactctgtagatagaccaggttggccttgaactcagagattgccagcttctgcctcccaattgctgggaatgaaggcatgcaccaggcttaattgtagttttatgttaatcattcccttaaccttgggcttgaggaggactttcggatggcagaagtctgcttctggtttatgtttttgtcctttgctgtacccaaacccatgccttactgacatcattgtcagctaacatgtttttagcaaatttagctcctactttagtttctaatccagtttctcaccatgtagcccagagtaaccttaaactccacctgatctgctataaaattgtttttgtttttagcataggagtcccatgcagatgatgatgatgatgatgatgatgtggtggtggtggtggtggtggtagcttgaataaaggtagacttcataggctcatatatttgaatggttggttccaagttggtagactgtttagaaagaattaggaggcatgtccttatggaggaggtatatcactaggaatgggctgtgaggtttcaaaagtccaagccaggcccagtttcttttatgctctgcctaaacatagggatataagtgcttagctcgttctctaacatcatacttgtctaccatcatgctccttaccatggtgatcatggagtagccttctgaaactataaacaagcccatagttaaatattctttttaaaagtttccttggtcatagtttttatcatagcaacagcacagtaactaagccagatgatgattttgcaaatgcttacctgaaatgtcttatgctgtgctatgacactatactctaggccactacagtatcagaattcatctctcggcttcctacccaagaatacaatataaccaactacctgggattccttccctgctgtgatggactatatttcttccaaccatgagccaaaataaatccttgctttctaattttgctttctgccagttatttcatcatattatagagctagacagtcattagctgacttgcaggccattgaaaatggacccttcacttacattatcatctttagattccactttctatttcactgacaattatagaaagagaagcattgcatgtcttcatccttaacatttaaaacaccatagaaaaacatggaggtgttgaagcttccttgaggcccattaaaggaaagctgcctcttctgggtcagaagaatggaatatgaattcttcccctggccctagtgagaagacgatgttccagactgccccatttattaggtcattgctattgcatgctattgtttcctcccttaaggattaatcccagctggggctgtcaatcacctgccaggggactgtgcctcaggaaaggagattcatctgaaaacatgctgagaagatgggaggaatgattatcttcttgtgagtcctaggaacccctccagtcctccctttatacatctgcttgcagaccttcacggctgagcctgccaacttttctgaattataactcaaaatacataacttccccctttccctttttttaaactatttttttgagacactggtcaaaagcctaagcatgctttccctgtcatcctgggctcccattgcttttctgaagatctcttcctttttacacctgctgacctccacacctaatttataaggcatgatttttctctcttagtcttcatctccttcctcttggcaactgccaggatgctcaacttgacttccttgttgttgtttttcaaataccaataaaatgatcattgaattttttttattaaggagactaagaaatctcaaaagagaaccttgatttcctggtaatatacatagcagtgagaaaagccctaatgtttgtacacatcaaccttaatccaaggacaagagggtagacctcattctatatttctaatccagtaaatctggggtgggtttaaaatttgcatgtctatcacattttcagatgatgttgcttctattctaagaaccacacttcaaaaatcattggtcattgacattgcagttgccctcataacaccattttattgaatgaagtggattgagtaatggatggtgacaagattgatgatcaaaagataaaataatgatcatgaggcccaagattccttttctgtaaaaggaattgttatttcagtcagaataaaagtaaaatagaaggaaagtttgcaaagtagaagggaagaaaaagaaagggaagagagagaggggttgggaagggagaaagaaagacagggaggaagaggagaatggagaacatgagggagagagggcaagaaagaatgagggaggaagggatgagggatggattctgggagccaacttgtattttagaatcaatggtggttttttttaaaaaaaacacttttaaagatttattaattttattttatgtgtatgagtgctttacctacatctatgtatatgtaccataagtatgcctggtgcccatggaggtaagaagaagtcatcagactacctggtgtcaattgatttaaaacactgtgaaatcaaatgattaaaaaaaaagcagctcatgttggaactcacaggagtaaaattaagtttctcaaggtgaatttccatcaagtaggatgaagtttcggtgacaggggcctttcctgtagacagtatttctgtccggcctggtcccacagctgtttagccccaaatgaactcacagaggcttatattaattataaacagtttggtcaatggctcaggcttcttattggctagctgtctcttaattattaaccaataactattaatcgatgcatctctacatggtcttatctcactggagaatgcctggcatcctgtcttccctattggacctgttattctttcagtggctacatggcatctctctggaggctcaactccctgcatcctctccccagaattctcctagtctggtagcccccacctatacttcctggcctggctactggccaatcagcatttattcatcaaccaatacgagaaaaaatattttcacaacatacagaaggacattccccatcattttgagaaatgctatgacctggtatgttaccatcagcatataaaatttgaataatcagtttacaaactcatgctctattatttaggggctttcattggaaattaagacaattgctagtaaatataacaaaaataaacagaggatattgtctgggttcatattatctctaaccttttctgtgactccattttgctctacttcagcccatgtgcactgattgtattactgagagggttggactactgtccttcttggaatttctcaatgcaatgccatatgttcaaggaaacaagctatggaatctcctttcttgagcagagttgcatgaggtgtaggaatgggctccttgtgctccacattttttctcatgctcttctcccttacttgccccaagtttcttcagtctgataaaacgttttgttccaaactccattcacttttctcctatatttgttgttgttgtgactgttactggtattttcaaattttcccataacaaatgcctacagagctttacactaaaacagtgtccatgtgaggctttccttaactgcccagattgacacatattttttgtagaagggaaaattatccactagaaaatctccaaattctgtttcctagaaattttggggatttcttctctgatagaatttgctttgctggttgctctaactgaattatccaagtgtccttcactgcactcaataatctcttataaagagatgcagagctatgtccaactttagcggagaaacaaaacaattgaagtagccagattagagtgccatcatctttttgttaccagggttgttaggttcaaagcctgggctctgcagctttcacaagtgacacctacctttagcatctgtgccagcttactttatgtcaacttgacacaagctagagttatttgaaagtaaggaaacttagctaaaaaatataccttcataagatctgactgttgggaattttcttaattagtgattgatagggaggactcaactaatgatgggtgatgccacccttgggcaatggtacagggtgccataataaagtaaattgagcaagccagtaagtagcactcttccatgacctctgcatcagctcatgcctccagtctcccaccaggtttgatttgttgtcttagctttcctcagtagactgtgacttgggatatgtaataaatatttcacatattcattttttcaccttttctccaacaataatcccttttctccacaagttgcttttcgtcatggtgtttcaccataactctaactaagacaacagtccaattaaacaaacgagtaatagtgaaaaaagatctagtttttgttgccacattgggaaacgaacaaatgaggaggtccagtgatttcttacatccacactggatcctgcaggaggcttaggtttacatacagaaaaagaagtgtgcatgaccaagcgttactgatcacagtatggtcccatccaccactgacctgccattgtcttaggtcttctcttgtgcaagtgggcttactgccagagcccccctaaatctattcctgagatatgagttccacctctgactggtatcaggctccagccttttccttctctcagcatgagactcctgggaaattccaatttcttggggcctattgtttcaatagtttgacagccagtgttgttataatttaagacaggaagggaacacatgccaaaggatacagcagatacccgaagctgaggtcaaggaaacaaatactctccaagtggctgtaggggggttgagaccctgccaagactttttatgcacatttaaacccatctcagaatgctggatctttataagatcataatgtttgtaatgttttagaatgctaagtctgcagtgttttgttacagctgcagtaggagcataaatatagccagtttgtgctatttcatgccagcatttttatttaacttgtttctcatgcttttgtggtcatctgtatacttgccttcccacttgatcaatggagttggaactctatcaaatctagtaatacatcatgtaatgtccttgtcagtctcctaaaatgtaatttacctatattccaagttttaaaaagtggatttgaaaaatgtcctacctatatagtacaagaacaataaaagaaagatgatttatgctaacttatttctatatgtaaatagttgggcacaattatttgtcaagataactaagacactatatataacatatattatatatgtactagcatatataaatatacagctgcatggtagatgcgtggtatgctttatagtgattcaaacctcatagcggcattgctgcccatgacacttattaatgaaatcacatggaagtcttgctaagttctgaaaacaaatcattgcaagtataaaatcatcccctgacttttatgaaagtgaattcagagagaatttaccataattaaaggagtgtgaatattatttctgttcattgcctaatatgcttagaaaacttcaaatagatttttaccatatataggtctagtgagagattgggaagtccagtaggatgatctttgtgggtggaaatactttgtctcccatggattctagggttacccagtgcttcctttctctgcctctctatcctgggattcattactcctattacctttttctactggttacacagaagtccttttctctgattcatttgagggggggaaggtgaatagttttatttaaaacaaaacacccctagttttagcactagttttagtgcctaaccacagagcaaatctgagcacctctgtggcttaagtttaaacatccctacaagatatgcctacagtttcatcctcagattgccctagatgagatccttccaggtttttcctctagttatttttgggacttagccagggttaaatgttatttacaggagaattgcttttataggagcttatgctccacaccagaacccagaaccatgcaaatttcctgaagggggaaacaggtgccttccccaaccaatggtattcaaataaatcaggggaaattaaactctatggtattttgcatacaccttagcatcaggcacaactcaggatatgctcacacccttccaaagtattctgacaggtgtgcttaacctggaaactcagcaatttcgaagggaatgcagaatcagatctgtgcatagcagagtggcttgtatgaggctgcaaagactctgtgagaagtgggaagggtctgtgcaattttgcaaatggagagaaatactagtgggctttctttgaactcacccggggtgttaattgccctcatttctgaaggcagcagggaagagggaagttggcaaggaagagtagaagcagccaaccctgacttctcttttctctgggctctagtgaaaagaggatgaaacatcacagagagatgaaaatcttttcgtctaccctgaatcaggccagcatgcttgatgactcagggaaggcattgatgggtaccacgttagaagaagaaagtaacagcaagcgtaggttatggacatattgttctgcctgtaaaatatccacgtgcctacttgccccttacaaagaacgatttatccagtgagaacaccctgtggggaagtagatcaaaagagaaaaccaacaagtgagatgaactagagcagggcttctcaaactttaatgtggaagccagtctcccctggcatcttggtaaatgcatattcagactgagcatctttgatgggggcctgagggtctgcatttatagcaagctccagtaagaggcagatgctgtgccaaggtacagtcagcaaatggatttcatgtggcagcatgttacctagagccgaccctggtgccaaatgaggagacgcaaatgaaaatttcacttattttactaccaggaaaaaatattccatggggaaagtgcaatttttcttcctttgtttgggaaaataatgtgtatattcaaaatatgatgttaatttattatcagggatagcacttattaagttcctactcattctgactgctctgcaataatgtagcttgttatgggttaggaggtgttaacagctgtgttattgaagtttatacaattttctcccaaataatattataaaactactattttatatttcagatttttatcttgatatggtttgggggtattttaaatccatgggtcttgtttggttcatgaagtaataaatggacatctgtttatatttatcattaagcttggtttttaatgctatattttactttaatatttttcaataagagaccacagaggtaaaaacaagcaatttgttctttgctttgtaactacattctctaaactacaagtagagattggtagaagggcaaagattgctgttctccagggtctgaaatgttcttaaaagcaagcaagtaaaatgtgaactattataagttatgtgttctagtttgatttctgttgctataaaatgctgagcaaaggcaacttggggaagaaaaaagtttatttggcttacacttccacattaagggaggttaggctaagcactcaaactagaattaggaggcaggaactgaagcagagaccatgaaagaacattgcttactggcttgctttgcacggattactcacttttctttcttatacacccaggaccaccttccccaaagtgacagtttctctacagtgtgctggccctctcacatcgatcattaatcaagaaaattcctaactggtatgcccacatgccaatctaatggaagcaatttctcagttgaggttccctcttccaaggtctccctaattttggtcaagtagtttgacgatttagtaagccagtatgaaagaatgtaagaaactgggtatttaataaatatgatttctcatcttaaaacgtaatgtcaatctaatcctgaaaatttatctgactcctcaaggcaatccctccatttctgtcagtcagatcgtgttgatacttaggaaatggtgtttcccttttgggttctttaatctctgtctttgttgttttgctattgtgataagaaaccatgaccaaggcaacttatagaataaagtgtttattggtggcttatagcttcagagagtgtattcatgaccatcatggtggggagtacggcagtaagcagtcaagcctggtactcaggcagtagcttagattttacatgctgatccacaagcacaaggcagagagagctaactgggaatggtgtgggcttttgaaacctcaaagcctgcccccagtgacacacctcctccaacagagctacacatcctaatcctccccaaacagtttcaacagctagggaccaagtattcaaacctccagagttcattaataaaagaattgagaaatgagcaaaaggaaactcatggacagttttattggagttcagggaaaaaaacaaaaaaatagggcaaaaaagctgaaagtcctggcagctgccattaggaggggcatgtaaaagaggaagagagaaaggcatgctgatcacaaccaaaagaaacttatagacaaaatggtctattctggcttgtggttctagagggatgagtccatcatgggggcatgaaaactggagaaggaaacagagatcaaatctttaaatgcaagtaggaagaaaggagataaaactggaagtagggtaatactacatatacttaaagcctctccatggtgacacgtttcttctagaaaggccacacctcgtaaactgccccaagtagcatcactgactaggaattaaactttccaatgcctgagtccataaaggacatttctcaaccaaccaccacagggtctaggaaagctgccatattcatcactggaagttatagagcagcagcatggaaggtggagatggggatgtttaagtctaaagttttagggaagggtgcctagacttcgtatagtctttataaagaaaatgctgtagaaagatggaaggggaaagttacactcagaaaagctgtcagacttaacagtgttgtcatgagttaagctctctaagtgactgtactaagggaaggcctcctgtgaagaatagtgttacctcatcaagggagtaactgttcttcccatcttcttagcaaatcttcagctatataagctaccctcagggctggacttctgccaaggtgatttacaagcccaactggatttaactctttttcttttctttttggttttttgagacagggattctctgtattgcttgggagcctgtcctagaactcattctatataccagactggcttcaaactcacagagttccacctgcctctgcctcctgagtgctggaattaaaggcaggcaccacaagcgcctggctggatttaactcttaatggaggaaacaatagtatacaatgtcctaacctatggattggaccagggtgtcatatcagggccaggagtataacattcattgaccagaatacccaaggaggagtcatgttgtctttcctagtgttacaagggagtgagagttgaaattcaaagccagtcatcaaggaagatttatcctgaatgccctcaaagactgcctaacattcatatgatctcaacagttctgcattagctatgtcttaagttccacaaacaagatttacccttaataactagaactacagtaaagattcatactctacttcagcaaatgctctactccttctaaaagacatgcagtaaaacgagaactattttgatagagagccattcttcaaaataataatgatattaataacaatgataatgaagaagaaaattaaatcgatgaaataaatgacaagaaaaaaattggtgacacaaatgataggtaagacctcttcattatttgcaagggaatctatgtcagcaagttgtggaaggaaagccattaataacaaattataatggttagtcttagtcattgacttgacacacctgggaagaaaactttcaattgaagaatcacctcaatcagataggcctatgggcatgtctgtggtgcattttcttcattgctaattaatacaggatagcccagctcattgtgggtgctagcatccctaagcaagtaagcctgaactgcctaagaaaaatagatgatcccagactcattttctgggtggatcttttgttttcctcattcttcattttttgacttgtacttatatattctggatatcatctctctctcagatgcatagtagaaagagattctttcccattctgttggctttctcttcacctggttgattgtttctttagctgtgttaaagcttctaagtttcatgacgtctcacttgtcagttgttggccttttcatgaacaaattgagttccattcagaaagttctttcctacatctgtagggtatgctgcctatgattcagggtgagatccttgatccatttggagttaggtttttgttccagtaatacagttcatttttgtacaggatgatggacaggggtctaatctcattctttttttgtgtgggcatcctgttttcccagcaccacatttgcagctactttttatcttcagcatgcttttggcaggtttgtcaaagtgtaaatagctgaagttctggatactgatgtttgagccttcagttttgttccattggtttacgtatctgttcttgaaccagtatcattttgatttttaggacagaggctctattatatatcttcatatctggaatagttagtaatccttccaccattgcccttttttgctcaagaaattttaggacactttttctatctctgtaaagaataagatgagtattttggttggtcttcgttgaatctaaggctcagggatcatcctggaagagaggttagaacaattgtaagagttagaagaacagtgagtttgttgtgagattttgtttactacaaatgtcagaagcaacataatatcttgccaaaatcactacctaaatgtgagctgacaaagacaacaatagacatgttaaagtggacagggaaagcaaggccttaaccctacatggagaactacaggtaaccaagggatggtgagaatgggagcatacagattgggaatccaatatcaactgtcagccctgaaaatatgcatacttgtgacgttatacagactgaacaggttgtgtttaagaacacacacatgtgtatacatcacatatgtatatgtgcatatgataatcactgatgaataaagaagcaattagtttgaaagagagcaaggaggtgtatgtgggaaaatttggagtgggggatgaggaaatgatgtaactatattataatctcaaaaaataaagttactaaaaaaaacgtagctggatatgagaacagctggatatgtcagtaaacagtgttcctctatagtttctgctttaagctgttgtcttgagtttctgccttgacttccctccatgatggactgtaacttgtaaagtgaaatagaccctttgctacccaagtggctttggctgtagtgtttatcacaacagaaaagtaaactggaatatcagtaagtggaaacagtcccattgagtaattttcacaagtgtgtaccagaagactaaaattgataagtagcaggaattttgtaactaatatcacagagctgcaagccagcactattggctgataactgctcttatttgcatgaccttgatttttagactagtggttgcacaactggattttaaatgcacagaagttcacactaacaatccagaactctggattcaattccttcacaataaatgaatgaaatgcataaaactgtattcagggaaacttaccctaaccaaaaacatatttcctcaaagactcctcccacccagccccagcattgcctatgatatactttatcatcaatactttatcgtcagtcttctaaagatatatttctcaatctgcttagggtaaatttatttattatccagttatccttccctgctactagtagataccagtctatagtaggcaggtagaatagaatttgttgcaagattgcatgttgaatttctaaaaccttataggcaaagtgagtaccattctagcccattttaagcctcaactatttttccagagaggtttataagcacaatcattttcataatatttatataatctatcacttttaaacaatcttccattaatcataagaaaacatgatctcttaactttctttccctgattatctgggtaggtaggaaggttctcactgcctttctctcatatattacagtcagaagtcatctgtgggcttgggaaggatactgtgggagttgggtctctcatgatctgtctagcaggcgagtagcagttcttaagacattcaagatttctcaaattgtatagtccaagagaaaagaaataaagtcctcctgatcttgtaaagtttagtcttgaatttacacctgtgacatattctatttattagtctgagtcacaagactagatcatacttaatgtgggcaaatgccaggaagtataaagatatcaaatgtgattcactggagaccatctctgaagactctaccctaggtaatattgaaagtctaaattagatagttttagaagacatttgaagatgtaaacactatttttgctttggtaggagagctatatagtatgatttaaaaatgctgatctgtttagaatcagaaaaaaaagcagaagaggaacaaaggacaaagctgagattaaatttgagtaactaaaaaaaaaaagatgttggtacccatgtctatgctagcaatggattaagatgagttatttataaaaagcaagtttaaaagcacatttacagggtaacattatcaatttgattgactgaacctggacactcttgagagggaaggttgtcatttgtggtgataaaagttcatactcttttatgataaagaaagtagaaaatgaatcagcaatggagtaggaataaaacaaaacacatatcaaagttatttctatacagcatcctcaaatggcttaacaatctaaaatgcccccaaaggaatgaggaagatgaagatgcctgagaaacagtacattgactttggtaatcagaagatcaaaattgaaggaaattctacttccagaaagtcaaccaaagatgttaagaaaacaaatctggtatgttttgtctccttagagggaaacaaagctgagcaacatggaaggcagagagattgttactgggtgggtcattgatgatgcctctgccctttggtgtcctcttgtggtttccatctttatctacctttatttttcttaccaaaattgtctacacattattgaatacaaacagtaatagttaatatacacatctttttaattgggcctaaaaggaaagtttctaatattatacacttagttaaagaagttcaattcctagataagtcttctgtttacatgactgctttgcccttccttcagttccttatgtgacttacatgaatagatatctccctagaaattatccttgaaattcatggaaataccttgaattcccaagaaatgttcaaattgaatatcaattatgatcatttgtgattcattgataaacattaatatcttctttgaaattaatttagataaacatgtactaattaaaattatacattttctcagtcttatcacataatagtgttcccatcttagttgtgttaaaaaactagttgaaaatttatttctctatttttttccttgaactataaggaaataagatgagaagtctgtttacaaaacagagaaatcaaggtttacacaaaatcattgattggtgaaatataagtcacattgagtaaccctgctagaagacaatctgagaagataatttttttagtagaaagtctttaagttttacaattacttcatttgcttatagcattcttttaatttttatcaactttaaataagtatgagaaaaacaagtttcattgagatgttttcatttatatatcattctacatttttcttattcattctccctctaccttaccccatttcctttaggctcctcccccatagtttctccttggacattttgtcaaacattccctttccctctcttgctctcccattttagtctttcctcctctctcatagtccccttcctacattcatgccctagaatgtctatctctctatccatatacgtatatataaatttaaatctagattgcacatgtgactgaaaacatgatatttatctttcgggatatggccaattttatttaccctaaggatctgtttcaatatgctattttgcaaatgtcattatttaattcatcttacagctgaataaaattccattgtgtatatgtgctatgcctttttttttttccaatgcattcatttgctgatggatatctagactgtttctttctttggctcttgtgaacattgaagcaataagcattaatgtgcctatctccatgctatgctggcttagagttttataagtgtattccaggaatggtgtagagagtgttctttagacttcaatcaatcatactgatagtggaaaacttaatgtcactagaaatttgaaattgttatcagagtcctgtagctgaagtgtttggcaatggcttgggggatataacagatcagactctgcattccaccacctcagtagtccatcaaacatcttgaatggcaggaaggcagaaaagaatgtattattcagcatggccacactagaaaagaggaagaagcccagaccagtgttctccttgggctattgacaattgttcttaagacaacacagagaattaggatgaggccaaacaagctcagtttgtggatcataaattggttttgtggggtcctacagctgcagggtaatcattatttcttcaggaagactgctacggctccagcagcagttttggctcccatcatgggaagtatctgcatacaaggttcactttttttcaagatcaatttcttacaatcttgaaaatacctgtttgtttgtttgttcgttcattcgtttgtttcttttgaggttctggagattaaatccagagcctcatctaagtgctgtgccttggatctatacctccaactcttctgaaaataaacaaataaataaataagcaaacaaaatcaaccccctttgtttattttgagagagggtctgactaagctgtccaggttggccttgaactcactttaaagttcaggcaagcattaaactagcagtatcttgctcagactcccgagtagctgggtttataggcctgagccactgatctcacctcttacttgctctgatctcaatgtctcagcacttccaagggaagggcaaggttacacagtgtggactaaccatctgtgtattaccgctgtttagacagcattccttaagagatcaacaggtctgtgtgcaaaatagagcaggaatctgcaagatcagcagatgcaatatgaggacagaggggtcaaacctataaaggtttgctgtttttgttgttgttgtttctgctgctattgtccttcggatcatccaggcctcaatgaagaatcagtgctttaaagacaggaaacactggaagtccttgccataaggacctagtggttttatcctgacttttgaaaagaagtgtattatattaaataggcttattaggatcctgagaaacaaagtgcaatcttaaagggcagacccagtggggtagggctggaggagcaataataatgacttacatgaattctttgttacaattagaacatactgtcatgattttaacaggaaattaaatatgatgctggtgtttggtttatctggttttattaagagaatacaattttcctctgagttatgcttaaatgtaaaaataaaagaaagctacaggaaacttgaatactcaattacaatttttacctgttttaacagctcctaagcaattgctgcattcctatctcccttctgtctatcccagcccccaacagatgctttttttctgtctccctccacaagtgactggctgtgccttagctttttcagagctatttgaaagtaagatccagacatcatgacatctcatccttaaataattcaacatgcgcatcccaagaactttcttacataaccacagtgccattaacatacccaaggaatttaacattgactcaatgggaaatggtaccttttacctttctctgcattagaaaagagatgatcggaatggtgtttactgaacctggatacattatctttcatttttaagttcgagaaacacttttccatgtatcagggttgactttgatgtctaatgctgtcaatattctgccagtcccagaaggtgaattttctactcaatcccattcaaaatcatttgccttctgggaggaaattattgtaaatgtagcaatttattcctgttctgctcctagagtagattcggggctagttgaacctgcggtgctagagtcgggctctgatgaaacacatctgtttggtgtcagcagctgcagctttgctcatcggatttgttttcaaagaggagagcaggttagaggagaaaatgtttatgtgtttgactttaatgatgtccacagataatgatggaggggaatggactacagcattgtttgtgattctgaagcctgctgaagtaagaccagactaaacagaaaaaaacatgaatcttctgttctttagaaatcctggattggcataagtctgtctttgtagcatagggatgcagagcaacagcctggacgtctcccatttctatggagatggcctttataatagagaggggctatgcaattgttccagttagtatcagtctagaatgggtgtggtggtacatacctgtaatctgagtaatccagagcctgaggctggacaaattgatggccagcctgggctacatatcaaggcattgcctctgaaaacaaaacagcgcaaacaacaacaacaaaaccaaagagagcagtttagaatcaaaggagactgggatacttctgaaataaaagcaactttcctggtttgtgttccaactaatggccctggccttctctcagagccatccttcctgtcttcctgtacatttaacttgtaaatgttgatttttaaaaccagataagcctttcacactcccaagtgtgaacatttctggggaaatgtaaagtctcctgcctagacgttcctttagctgtcctaacacctgcggcttctcacacaatgagaaggaagcttgcattttgttgcagtctttaaaatgaatccaaacggcacttttcactgtttccatttccttccaagagctggaaattgtgataggaatttcagaattgtttaaagccgaagttaaagaaaatagtttgtgaagaaaccaattcctattcataggctaagtgttgaggttccaactattgtccttgatgactcaggaaaatgcctatagcttatttgatagtgctcctaatgcatatatatatggcaataatggatgttaatttagtatttaccatgcattatgatgcattcaaacctttgaagaaagcagttaaggctgagcaaacctaacaaagagggaaggcactctccgaagcacttaaggaaagtaaccatagcaggaagtatttatctgtcacttcatgttttatgtagtcggaaaagagtctaaagaaagaaaagaacatcgtgatggaacttagaaatcataaggaatcatttttagaaagaggaattaaaatatttattgcagatctgccactgcgtgcgcggcacctttaaataatgaaatactgttttacaaattagttccttgctgaaaacagggacaatgtattttcacgtccaccctcaacctcagtctctcaaccaagggaagtaacaaacgccaagcattgatagatacaggggagaggaatgacactctacaattcagatccaaagcaaaaggaatgtgttcttttgctctctgatttcgcatgatcctttatctaatacagtagatggaatgtttgaatcccgtagataaaaccagcctttgccattctattacccgtgacaccaacacagtgtgggctatgctccctcacctttttgagttgacttttgtcattcattcttgaacagtcatagtgccacagtttcatttactctagaaacaaccttagaatgagattcaagttagtctgggagacccagcagcactaagaaaatgggacagcaagacagggaagaaatggcagtcaataaaggcttgtctcttccttgataggcacctgagattgaactatgggaaaagctgtgagaggtggtatagaatgctcagaggcaagggagataggcatatctacccaccaatccttcagctctttagctaaccccatccacagggcacttggcacccagccacctcatgaaaaacttgacagaaagtcaaggaagataatagtagcaggaaactgaccacagaaatacaaagtctacagtaatcccagtatattgcttcccctatagggaccactggaatgtgattttgcttattcttttccttacaccttgattccgttccttcctaccttctaccaaagaagatatttctttgagttactttttaaaaaatctcatttctttatttgccattgttttttcttttagcagtactcaggactgaaccgagggtcttacacatacaagtgttcaacatctctagttttgtttatcatttgtttcaagacagatttgctgtattgttcaggctgttcatcaactttctgtgtagcccaggctgaccttgcatttgtcatcttcctgttttagcctcttgaatagatgaggttataggcatgtatcaaaacccaactcaaaatgatctttcttatgctatttttgtactgagaatattcttaggtatctgcttcatcttcacaattacaacatgtaataaagaaataggttcctgacaataaaacaatttttctaagataaaaaggattctgtacatttataactttttaatgctcaactgtcttagactcaaatggccccctggaaacatttgctgaatgaatgtgcccagaaaaccaagtgccactgggaaatcaagtgccagtgccttactatgaatatttacctagaaaaatgtagataataacacatgcattataagaaatacattgtattcatagcaccaaatgtagctaagatttgcaaggaaaaattcagagcacaaaattattgactgtatgttcttttcaacctgattgtggtaacttttcttcaggactttttttcagcgtttttattatctgatttgaagctctcgcactcccccatgttaaacacattttaagtattatttacaaagctaacataagtcccagaggactaaaatcaccaccgttgaatcttttagcattctcatagcaggaaatatgtgcttatcctatgatgtggaaagtggctccttttttctagcagccaaaagacatctttctctaagtctttatgcctttgcattgaatgaatctggtatcacagttattttcaatttgctttcctgaaccattgcctaaagcttatagttaactgtctgatttcatttattaaaacacaatctacataaattaaatatataaaaattacattttatttttaaaatagtttttgtcattgacaaaaagagagagagatcttgacaattagtcatgtatacactgatgaacgacaacaacagcaaaagacacaaagagcagcaaaaagaattggatggggtgattggttgactttcagccaatggttaagctttctcccttagctctatttgaaacaggcattttaaagtagggtttcatgaactcactgtttaagataggatcaaagacttactgctcaaggacagcctgagactagctccacaatagatcttcatcagttctaaatggaatctcatgagtcaacacaagagacacatctaagaattatttgctgcaattagctaaggttataacaacagtgttaaagataacgctcacatgttaaggaagcatgtaaaatgagcatgctcattttgtaacttcacagatgagacgctctgccaccataagcagagcttatgtagcttaactaaatttgctttgttataccaatgggcagacatgcatagttgtggttcaaatcataggtatgggctgaactgaaaggtgctcatttgcattttgagttaaaacaaagcattatagtcactttaacatttctccctaaatgtagatacctttaatttcaaaaaggatggatggccagcatgcagctcatgaaggatgtataaaaaatgattatgtgaaagcaaaaattcatctctaccatgatatttatgcaacatcttgtatgtttaaggcctatggacatgagatagcaggtggtactgctctatacagtgttctatcaaggataactcagacttcaaacagtgaaatgtatgaggtgctattctcttataaaggagcccatttctatagaagtctccttatttaaaatgccaaatttatttaagctccaccctgctactcttagctgtatgatgttgggcaaatcacatacatcttttgacatccaatttttaacattttctactctataattgcttgtatatttactgtttgtatatgagaatcacacacccgaggaaagtcaccttcatctccttgggcatctttcatagcttttcccctcaattgctgttttacaaaatgagaaaaagtttctcgggtcctaatttagtttcttttgttgccttaacaacacaagaccagaaacagttgacctgaacaagggagagttcttggtccccagactgatagctgtgaaaccagcatgggactgatacagaacccctgaatgtgggtgtcagtgaggagaccttggaaatctatggggcatcagtacttatccttagcataggaatggactttgggagcccatcccacatggaggaatactccctgagtctagacacaaaggggttggcctaggtcctatcccaaagactatgacagactttgaagacccccccccatggaaggcctcctccccagagcagaaagggtatggggtaggttgggtgttagttagggggggcaggggaggaagggagggagagggacctgggattgacatgtaaaataattttctttcaaataaaaaaaagaaaaaacttccggtcacttaagttatatcagacatgacaataaacagcctacagtgccaagcaagtttctaaagtcttcccttccagagggaaagaaaactaactcagaaagaattcctgaagaacctggggaagcagcaggatttcctaactcagcatctttctcaacaacagcatacaattatcttataaaaagtatggcatttagggagatttaatagaaggaagactgtatctattcagatatcactggtaggcactctgcctctaaaacatcttaatttgttatgactgagagagatcagctggaccaaggactaatgcagatgactgctgggaagacagcatccttttcccatgagggtgtgtcatgtcatagccaccacctcccaccactgctgcttcagccactaaggaatacccgaatttttcatccttaatttattctcaatgttacaggtatctgaaatttcatgtactctggaaagagagtatctttagagctataattctgggaatatttctcttccactcagtattaactcagcttttacctcagtatgagagaactacagggaatatcataaaaatcctgtctgggataaacactcaagtttattacaatggcagaagaatggaggttcagctgctgacagtagttctgttgggcagacccacctgtgaaagacaccatgaataaatatagcttccacaggttttttttgaggatttttactatatttttaccattgttttgattggaatgtcattttcttatttgttcttgaaagaaagcatgttctatttttctgtttttatttttactgttgcaaaagtcacataatttgtaacctgtattagttaattttctattgatgtagtaaaatgccatgacccaagggaacttttttttctgacagtttcacttgtaacagccctggctgtcctggaacaactttctagagcaggctggactgaaactcacagagatctgtcagcctctgcatcctgagagctaggattaaaggagtatgcaaccacacactgagatcaaggcaacttataaaggaaagcatttaattgtgtttatgatgttaaaggattagagtccatgatgatacaaaaaaggtatggtagccagaaattgctgaaagcttatattttgaacaggaaacagggacagctaatgtgaaatagcctgagtctttgaacctcaaagctgcctccagtgacacacctgctccaataagactatgctttctaatccttcccaaatagttccaccaactggggaccaagtatttaaacacatgcatttatgatgactatcctctttcaaaccaccaaataacctacaacattaaccattttaaactgcacaaaactatataaaactcaaactatacataacaaatggtcattttaaaagtttattaattttttttatttttatatcccaaccaaagtttccctccctcctcttcttccagttcctgccccccaccttcaatccactcctcctcctcctctgtttctcttcagatatgggtaggcctcccatggatatcagccagccatggtatatcaagttgcagtaagacatggtacctcttctactgagggtggatgaggcaatctggcaggaggaatggatctcaaaagcaggcaacagagtcagagacatcacctgctctcactgttaggagtctcacaaagagaccacattacataactacaacgtatatgtagaaggcctaggtcagtcctatgcagtatgtctggttatctgttctgtctctgtgagtccctatgagcccaggttagttggttctatgggttttcttgtggtaccctagataccactgggtcctacaatccttcctctctatcttccacaggattccatgagctatgcataatgtttggctgtggttctctacttttgcttccatcattttctgggtaaagcctctctgatgacagttgggctaggcacttgttcttctgactggtgtggcctacacctaagcagttgaagtctgttcaagctagtgtggcttgtccccgttctgaattgtgtagctcaagcctgagtggagtggctgaaacaccctgaggtttggggcagggcccatcagtggtgccagtgacaaactagaaacatgtaggccgtgggaagggtccctgggaacagaatccaggaagggagccactctgttggcaggtgagtcgcttaccagttctgactcagtaatttatttttattcacagtgtggtacaaccatcaccactacctacttctagactattttaattacccaaaaggataagattagaagtattaggcatttgtctttcaccttgtgacaaccacagatcaaccttctgtttctacagtttcacccattctagacatgtcatagaaatggaatcatacagttcatgacttcatgtgactgtcttctttccaatatcatattgcttgcatgattcatttgccttgtagtgtgtattgatttccagttatcaattgattgccactgagttgattagattgttgactactttgaataatgatgctgtgaacattcattttggggaacatattttctgctctcttggaaataaactctgcttaattttttgaggaaaggtcaaaatatttgtcacatgaatgcatcaatttacatttacacaagcaatgtaatttctccacaatctcacttaacacttgaaaatttatgtgtcaaggagacatatttttttattttaaaatattgccatccaatgaatatgatgtagtgattcttagtgacctttcatgtgattattaaccattggtatacattctttgatgaaatgtctgcttaagggctagtgataaggctcagtaatagtggttgtcaccaaatatggtagcctgagtttgattccccaggacctaatggacatagagaaatgactgctgcaagttgatatggccaccacatgctctctctctctctctctctctctctctctctctctctctctctctctcacacacacacacacacacacacacacacacatacacacaccaataataaacaaattcctatcttcccactaattctatttttgctattgaattttaagaatgttttctatcatctatgtgctaattcattatcagacatgggattaaaatcttttcttttgtgctttgtgtgatcagtcaacttctttgaatgtgccctttgtagtacacacacacacacacacacacacacacacacacacacacacacacacacaaacacaatttaccttgacaatgcccaatgcatttattttaaatattagttccttgttccattggtttcacagttaagaaaacattagttacacaaaagaaacaaggacttttgctcaaagttctttcaatatgatttacagattaagttcttatatttaggtctttgacctattttgagctacatttttggtgatatatagtaggaaccaaattcattctttctacacagacagtccacactgttaacactatttgctgtaaagactctactctgagtggtcttggcaatcttactacagttcattcaccacagatgtatggcttttatttctatactgttggtactattccattgaactgtacattgatagttatgtcagtttcattattatttgattaatgtttactctggtaagtccagaattaggagacatgtgacttctctaatttatgtttctttttcaaaattattccagttcttcaatgtccctagtattcatttggggataaaaatcagttaggatttttatagagaaaagattgaatccttaatcgatttgggagtgttgctgtcttatctgtattaacattctaacctatgagcattatacacattcccatatttatatcttcttccatttttatcagaaatatcttaagctgctatagtgagatataccttaagttgcattattcaggaggctgagataagtacatctctgtgagttctaggtcaacctggtctacatagtgaattcaaggacagccaattctacgcagagagaccctgtctcaaaaacaaacacagttttatcctttacaattgtaactatcttattccttcatattttaatcttttcatataataaggttttcatataaccttacttttatattataaattacatgtgttttgaaatgaattttattttgtgtatttccttataaactataacttagctgaacttttgtatgagttataataatatttaaacatgggttccataagtgataataatgtctctgaataaatgtgtttttacttcttccatgttctgtagtttttgttctgcttaatttccctagcttgaatttacagtacaatgttgagtggaggagagctgaatgaacatttttgtctttcctgttattgaagggaaagttgacagtcttctgtcatggtgtgtattgttaactgtgggggtgggtagtcaaatatatctttacaaacctaaacaaagtgtcttctattcctagtttgttgactgatttagttatgaaagagtactgtgttttgtccagtgatttttttgcatctagtgaagtgacatagtaagggactcctttattccgtgactatggcatcatacattgaatgagttctgatattctactgtccttgcagcaaggagctaaatcacctgatcatgatacttgtcattttacactttgaatattttaaatgctaaggtttccatagtggttctcccatgcatatttataaggaacattaggttgtatctttatttccttgtgatattttttcttaattttggtaatcaaagctataggttgataatctatagaatgatgagaaattgatcctccagctgtacttttaagaacagtttgaaaaatattggcattaactttttagaattgggtagaatgggcctgttaacctcaaatgttaaaactaaaatatcaacacagatgcattgccttttcctcaaacacaatgaccatacccagatgaaaagaaacaataatgaaagtgtgttgatcctcgtaagtaagaaattccaggatgagttaaatttccactatagctgcactcaggaattagtgtggtattattaggatttccataaatcttaagtccgggtctttttcctctgttaactaacatgtactggggcttgtactttgtcctggttagttccctgagcagagggatctttaattgttggagtgatcagcccaatgtgggtggtgccacccatgggtagagggtgctgggcactttgacttttatttgattgtgactgtgccctggttttctcctcttggagtacaaaagtaacttagttttgattttacaggagcccatagttaagagatggataaagagactgaacttttagaatgtttgaatttttaaagactataggactttcaaagttatattttatacggtcatattgatattaatataagatgtatgatcttagagacagaaaaagttacagttgagcagtaatttattaatgtgtcaatttaacaaagagtcaactgtcctgattagattttgtcaatttgacacaagctagggttatctgggaaaagggagaaccttatttgaaaaaaaaaatgtgaccatgatcttggcctgtaggcatacctgtgggacattttcttgattaatgagagatgggtggttgcccactgcaaacagtgttattcctagtcaagtgatcctgggttgtgtaagaaagcagcctgagcaagccatggagaacaagccggtaagcagctcgtctccatggtctctaattcagttcctgcctccaggtttctaccttaaatctctggcttgtattcccctaatgggctgtgacctaggatatgtaagtcaaataaaccctttcctgcccccaaaagaccatttgtggctgggttttgtcacaatagaaagcagattgagacagatggatacagaaagatgggtagatgtgtgtgtgtgtgtgtgtgtgtgtgtgtgtgtgtgtgtgtgtgtgtgttggggtggaggcagcggtactacctccaaacgtacagaattgtctacctgacttttctttttctttgacagtgagaagaggtgaaatatctcctacccgatttattccctgtttcacaaaatatggcacttgaaggtacacgcatatttttcttactctagcacttggaggtgggtagtcggtagaatttccagacttaaggaatttaagttttctatcagtcctcatttctgggaggtgtgaacttttatcttgtgctgtttcttcataggtattttagtgatatgttggagcgattgcagtaaaaattcccagccagatgctctttaaggtggaaaacaagtgtgttctttgtgttcacacgtgtcctgaagccaaagtgtgctatcagactcctttggagggatttttttccctagcaggaccaagcttaatttaaaatcttcaaagcttatggactgtaaagtgatcagattctcttgacactatgtaaagcacagggcctttgggctccattatttgtgctggatttaatgagccatacaaagaaaaaagaaacacctcaccactgtgagatgccaagcacaaagacaattagcaacatgagatgtccaaacttgtctgagatactaacaccctttaagaggtggtctggttgcttcatgttctccccagtgagctgggattcttcttcgttattaggtctcggcttcagatacaaaccagagtaggaatattcacatacttgaatgcccaagttgtaattcctgcatgctgattagaagatacccacttttcttgagaggcttgctttactctcaaacttggaaaagaacaggaaatgcaagtaaataattgagtcaccacttgccaagtaccccaacagcatagcacctgagtggctcatgtaggatagcaaacaagaaacatcagtgtcttaagttccccttggtataaaataagataataaaaagataacacttatgaattcttatgctgctattgggttttctgacaactattaaacaaggcctactgttgttttagaatgcttctgcaatcaaggaggcttagtctaaataagaatttgtgattttcattgctactgtatgatatttcctttgctgttatctttcaggacacctttctcatcctacacctgtctaaattccaatgaaactcttctctcaactgcattcctttggctgctcctccctcagccttctgtaacattttggctgagtatttttccctttgtccccagtctcactgatttgtctcactatgtgcttccttgatgcagagtgacataatctctgacctttctttattagtagcaatggagacatggtgaccagaggaagagattcgatgcataatggctgagttggctttgctttggtgggctggatgatagaagacatttttacatgatacaatttttacttcactaaagaagagttttgtccatcttggtattggcacaaaaatagacagatagaccaatggaatagagttgaaaaccccgatattaaaccacaaacctacgaacacttgatttttgacaaagaagctaaatttatatgatggaataaagaaagcatcttcaacaaatggtgctggcataactggatgttggaatgtagaagactgcagatagatccatgtctatcacaatgcacaaaacttaagtccaaatggatcaaatacctcaatataaatccagccacactgaacctattagaagacaaagtgggaaatactcttgaattaattggtataggagactgcttcctgaacattacaccagtagcacagacactgagatcaacaattgataaatgggaccttctgaaactgagaagcttctgtaaggccaaggacacagtaagacaaaatggcagcccacagactgggaaaaatattcaccaacctcacatctgactaatggctgatctccaaaatatacaaagaactcaacaagctagtctccaaaatacaaaataatccaattaaaaagtggggaacagaactaaatagacaattctcaatagaggaatctaaaatggctgaaaggcacataaggaagtgttcaacatccttagccatcaggaaaatgcaaatcaaaacaactctgagataccatcttactcctgttagaatggctaaaatcaaaaacaccaatgatagtttatgatggagaggatgtggagaaagggaaacactcactcctccactgctggtggaagtgccaacttgtacagccacttttgatatctgtatggtgactcctcaggaaaatgggaatcaatctaccacaagatccagcaattccactcttaggcatatacccaaaagatgcacattcatacaacaaagacatctgttcaacgatgttcatagcagcactatttgtaatagccagaacctggaagcaacctagatgcccctcaactgaagaatggatagtgaaatgtggtacatttacacaatggagtactactcagtgggaaaaaaaaaaacaatggagtcttgaaatttgcaggaaaatggatggaactagaagaaaccattcagagggaggtaacccaatcacaaaaagacaaacttggcatgtactcactcatatgtggattttagatgaagagtaaaggattaccagcctacaatccacactgccagagaaactggtaaacaaggaggactgttagagagacatacatggtcccctggaaaaggggaaagggacaagatctgctgagcaaattgggagcaagggaggtgggggaaaggagctaggagaatgagaaggagagaaggggaggggtgaggaggacatgagggagcagaaaggttgagtcaggggaagaatagaagaaaacaagaaaggaaataccataatagatggagatattttacatttacagagaaatcaggcactagggaaatgtctggagatctacaaagatgacaccaactaacaatctaagcaacagaggagaggctatcttaaatgccctaccctgataatgagattgatgactgacttatatgccatcctagagccttcatccagcagctggtggaagtagaagcagaaacctacaactaatcacttaactgaactggaatccagttgcacagaagaacgagtgataggcaaaggggtccagaccaggctggtgaaacccacagaaacagctgacctgaacatcggggagctcttggtccccagactgatagctgggataccaccatgggactgatccagaccccaggaacatgggtttcagtgaggaaacctcagaaatctacaggacctcctgtagtagttcagtacttatccctagcatcggtgtggactttgggagcccaatccacattgagggatactccctcactcaagacacctggggtgggcctaggctctatcccaaaggatatgatagactctgatgaccccttatggaaggccttaccctccctggggagcagaaaggatatgtgataggtagggtattagttgcaggggtggtggtggtaggggagtaagggagtgagtgggaaccggaattgacatgtaaaacaatcttgtttctaattcaaataaaaaaataaagaaaaaaagaagagttctgtctttaagagcctctagtccaacaaaaagcaaaggagataaggatgaacatggaagtacaaaggtacatgattatttccttgtagtatgcttagccttgtcttttagttatctgtgtagcaaatcacttgatatttaacatcacagaagaacaagaatttattacctcatacattttgaaggtcaggaatatggatatagtccattcacatggttgtaggcataattcatttcttaacagctcactggactcagatttttgacaatggccttctccatccttcttcattgggaaactcataatgcagtttccctctgagacagtgagctgcaaagtgagaaaatgagaggaaagtgaatgtttccatatatttgttgttgttgtttgagatagcatctttctatgtagcatgggttgtctcagaactcagtttgtagatgagactggcatcaatctcacagagatccacttgcctctgcctcccgagcagagattaaaggtatattctaaactaaggaagtcttattcttggtggatgatggctttgttcaaaatatcttcatggacaataaaacgtatggcttttaatatatctctcccaatgcaaagattgaaatggtataactgccactatgatcacttagttaggttccccaattttaaaaatcatgcacacctacctttttctctctcaccacctgcatagtcgaggtatattccaggtaggtataaacatcaagtttaagatctgtcctgaaatttacataactcagatagctttaaaagctaaaaaataaataaaatgtaattgatccacaatgataacaaggtaagtagtaaaagtaggtatcaacagctggtgttgatttcataagccaattcttcctggaagaataccctgagtatcatagtaaacactacaagagctggtggtgcaatctaaattatacaggaaaagtggttttcatagttccttgcaggctccctgttgtcaatcacagcacacaattcacaaaaattgtggtgagaggcacactaatctttgtgtggacaaatgcatgtgcacagagagaaacataacgtatatgtactcaggaaagcataaccatcattgactacttggaaaaaattattcagcacagtataccttagccaaattctagactaagcacaagcactctgaagaccatagctgcatcgttagcagcttgcatttaaatgatcaagaaagaataatttagaataacaattaagaattgttttatctttccatttgtcacattttaaaaggaagcatttgcttttatttaaaatgcattgcaaatttcaaacatatactttgagtcatttatgaatatgaaaaagcctgaaatctcaattttaaaaatgttttgacatttttattcattttgccattcagtatattaccttaacaccatcagaaactaggagagatcttaaaattataaatgactgaaaagagaaggcacgtagatgatgtgtatctgggcattgtgagaatattcttcctttaaaggcaatgttaattaagactgagtttgggggtgggaaattgggggatggagaccatggggagcacaggaaagttggatagtgtcaaactggtgcttatcttttttgtcccctcacctctttcctggctccgttgtgctccaggtcctcttttgggagtggagtgaagggtatcccacaaagcagaagcttgtgctgtaagagctaccctattctgtctgtctcctacttaggaccccaaccaaaaccagcttaggggaggaaaggtcttatttgagtaacatttccaagaccaactctatcactgagggaagtcagggcaggaactcaaacaggaacctggaagcaggaaatgaagaagagatcatgggggagcagaggagtgctgcatgctaaatgctgcatgcatcatttctctgattgttttcttataaaacccagtattacctactcaagtgtggcatggcccatagtggtatattccctcgaatatcaattatttattaagaaaatgccacatgcatgctcatagttcaatctgatggaggcaattcctcaactgaaattcccagttgactctagtttgtgtcaagttgacaaaaactaaacagtgtaactgacctcttgtcaacataacccacaaaaaaatcaccttcaatcataacgtttccttatccccaagacctaatgttaatattaccatcatagtacaagacatgttataactttaaaagtcccacaggcttttaaattttccaatatttaaaaaaaatatccaatttctctttaaaatttcaaattttcctaactgtgggctcctgtaaaatattttttttaattagttctttcttattccaagaggtaaagacaaaagcacagatataatcaggtcaaagcaaaaacaacatcatgaaagctcattgcccaatgtctgggactcactcatgatcttctgggctccaaagggcttgaacagctttcatttttttttctggctctaccatgcgcggaatacacagcttgtcttgtaggctcttgtgggctctactccataaccactactgtcctttctgatttctaattttcactttatttctgtttattttcttactcctaattctacattggtgttgttaaaaggaacttctgataaagtgggagatgttctttgtctgtactgatcagtacatttactcactggctaagtctgtttgctgatcacctcacaacatgaatgaaaagctgactttttctttaaagatttatttctttttcttttatgtgtatgagtgctttgtctacacatatgtctgtgtatcttgtgtatactcagtgcctttggaggcagaagaagatgttggatcccctggaactggagttgaaaatatttgagagcttaccacatgggtgctggaaatcaaacctgaatgttttgcaagaggagcaaccatttagctactgagccattacttcagaaccaacaagctgaccttctcattacattcttctctaattgatattaattgaattagtatggcatcactgagggttacagatttagacattagagtcaaagatgcttaaatttcacaatctcctcattgcatggtggtttatcccctaggtagaggctgtagttatatattttctcctcccacccagccttgtgtcttttttgtttgtttttaatacataacaactacagttttctccctccactccttccaccccatccatcccttctctgtttccctccagaaaagtgcaggcctcctagtaatatcatatgaacacagcataacaagatacacaataatattagtcacaaaccctcaaaacaaagctcgatgaggcaacccagtagaaggaaatgggtcccactgttaggagttgacaagaacaccaagctaacagccatagcatatgcagaagacctagtacagatctattcaggcttcatgattgtcctttcagtctctatgagccctgcttagttgatgtttgtgggccatgttctgatatccttgacccctctggatcctacaattcttcctcctgttcttctcaggaatccccctgagctccaaggagagggagccaatagagatctccaattttggctctctctctcagctgtgtgtctctgcatctgctcccatcagcttctggcagaagcctctctgatgttgattgggctgggtatcaatctatgagtatagtgaaatatcattagaaatcattgtgttgatttttatctaccctatatctcttggctatccagcatccagcttctggtcattcaggcaatgaccagcatgggctcccactttgggcatggccctaaagttggaccagtcattggttggtcactcccatgagttctgtgccaccattaccccagcacctcttgcaggtggagtagactgtaggtcagaagtttggtggctggtttgctgtcacagtcccaacactagaaattgcctggttacagaggatggctggttcaggctcctgtattctccattacttggaatccttgctagggtcattctcatagactcctgggagtttctactgcactaagtttccacattggtcaaccaatgtcctctaactccagtcatccattccatgccccacacactccctctccaacccttctcactggatccttcttattcccatttccacttgccccacaccccaggctacccacaaaatctatttcatcttcccaataagatccatacatccttttgaaagtcctccttgttactgagcctctcctggtctgtggattgtatcatgattatcatttacttaatagctaatatccatttataagtgagtacataccatgtttgtttttctgggttacctcactcaggtgtgaggagaggatatgcagggaccaggaggtgagtagaattggggtgtatgatgtaaaactcccaaagagtcaataaagcaataagtgaaataaaaaaataatagagcagcaatgaacatagctgagcaagtgtccttgtggaaggatggagtgttcctgtggcatatgcctatgagtggtatagctggttcttgaggtagatggattcccagttttctgaggaaccatcatattgattataattagtgattgtacaagtttcaccagcaatggaggagtgttttgttcctcttgaatgaactgtcacttgtgtttatgatcttagccattctgacaaatgcaaaatggaatttttgaagtatttttgatttgcatttccctgatggctaaggatattgaacatttattttttatttttataattgtaattagaccaattttaaattagaaacaagcttcttttacatgtcaatccaagttccctctccgacccctcctcccctgctcctccacccctgtcccagcctctttctgctccccagggagggtgaggccctccgtggggaatcttcaaagtctatcataacatttggtgcatggcctggaccctcccctatgtgtctaggctgagagagtatccctctatgtggagtgggctcccaaagtccattcctgtactggggataaatactgatccactaccagaggccccatagattgcccagacctccaaactgacattctcattcagggggcatggataagttctatgctggttgatttcccagctatcagtctggggtccatgagcaaaccattgttcaggtcagctgtttctgtgggtttctccagcctggtcttgacccctttgcccatcacttctccctctctgcaactggattccagagttcagttcagtgtttagctgtgggtgtcagattctgcttccatcagctactggatactctaggatggcatataaggtagttatcaatctcattatgggagaaggacttttaatgtagcctcttgactatttcttagattgttagttggggttaatcttgtagatctatggatatttcactagtgccagaattctctttagacctataatggctccctctattatggtatctcttttcttgctctccgctattcttcccctgactaaatcttcatgctctctcatgtcctcctctctccccctgttctcccctcccacattctcccaattagctcaggagatcttgtccctttccccttctccaggggaccatgtatgtctctcttagggtcctccttgttttctagcttctctggcagtgtggactgtaggctagtactcctttgctctatgtcttaaatccataaatgagtgagtacataccatttttgcctttttgtgactgggttacctcactctggatggtttcttctaattccacctattttcctgcaaatttcaagattccattgttttttttttcccactgagtagtactccgttgtgtaaatgtaccacattttctccatccattcttcagttgagaggtatctaggttgcttccatgttctggctatgtgtttctcagtcatatgagatttctctattgagaattctgtgtttatatctgtaccccatttaaaattggattattagttttcttggtaactagttctttgagttctttttatattttggatattagcccactttatgatgtggagttgataaaaaaaaaatctcttcccatgccattccaagtcaagcgtcttaatacctgtttccactgggcctgtcagaaagtagaggccattctgtctgaaggtggaggctttgaggctgggaagactaagcaatgtcatgcaatgctgcaggaataaagaacatgttcaaggacatagtttctcttatagatgacacttcattttaaaatgctatagaaatatgctgggagtcactttatgcttagtgctggttttttaatttatggtgtctagaatcactcatgagatgagcttctgggcacatctgtgaggaattacctagattaggctagactttgagcacatctgtagggaattatccagattagtttatcctttgggtacatctgtggagaattatctagattacattagcctctgacacacctataagtgatgaactagattatgttaacctctgcttacatctgtgagggattatctagattaggtcagcttctgtgcatgtctataagtgatgatctagattatgttagcctctgagcacatctgtgaaggattatctagattaggttagtttatgggcatactagtgaggcactttcttgattatgttaattgaaatgggaagatctactataaatgcaacagtaccttctggcagatatacgacagagagaaaagcttgtaaatgcattcttccctatgggttactgctgccctgggtttataactgctgctgccatccttcaatggcatcagaatgtaggtttcatccttctatctccagaaatcctccagaccttcagtgttagattggaattattgaggcatctagccttataggttgagtacccaccagtttctaagcatctttaatatgaaggcagtcattgctggaccacccagactgtattgcataaggccatctaatacaactcccttgaatatatgttcatcttattgtttctttccctctagaaagccctgactctacattctccttgacttgtttcttatgataggacaataatgaggatgtttctttagacttcccagactactgaggttttcctaggcacattgtcttctctgattaaaaaataatgtctctcatcattggtctctatttaatctgaaaatatatcttgtgcttaatgtttcttgatcagaattgctggcccatttctacatctccacagcactcattgctgactgaaatggattataatgatctgtggttctgtgattctccatcaactctcctgatagtgggagtctcttaaaggacagtatcagtcccactgctgtatagaatgtcccacatagaaggatcccagacacccctcatgagattgacagctactttgctctgagtcacattccttcacaaactactcactttgtcttgaggctctaagtatgcttccatttcatttaccaccctgcctaccttcctatcactgccatcactgactccatgtaaacaaatgtggatctgagaacattcatttacagatttgtttttctgtgtatgtgccatggttgaattttatcgatttcttctgtttgtttcatatatctttttgcatctcataaattacacaataagagaagtgattttatccagtaaaagtctcccacagtcagaggcagtgcttctcagccatcttcttcataatccgcatctctcctttagcctctacccatctttcatcactagccttaattatgccaataaatcccaccatgggactgcccccattgtaaattctttataattattttctcctccatatgctagatgcatccaaattcacaaaagctcaatatgtatttgacaagttattaaatactgaaccaaaatgtgtttcaacacctacacatgataacggttgcagtaaataaataagaggtttatgatgaaaggcatttatcctgttgaagattacaattaaaccattttaggtggtacatttaaagcattagttttcctaatctttgttgtcttttcttgacagttttcacaggactcttggatccttttggttcagggcatagtgctacattgatctttttcctaagtgcagattggattttcagtttcgcttagatttgttcccttgtcagttattattatattattgacaccaaatcactgccattgcccctccagaacttgggtgaaattagtgacttgcagaaattttactggtggtcagggtctaggacaattgttttcaagttgttggctcttattcaaagaattgaaaacaagggctcacacagatttaccaagaagcaaaactaactttatttggagcaaagcaatagaacagacctgaggatgatgtgctgtcagtcttcatggggggtcacagcagtgtaagtacttaagggtctggctatttattgttcagtgcttccttttatggggctcaaaagaaggaggaattaattactaaggggtgtagtgagggtggttctctattttgattgatgatttggtcatacattcatttacttctaatgcatatttccttcccataatgcatctaattctaatcacatgtacattcaattatacataggcataagatgataaataggggattctccctaaaagtctgctggaggacataattttgccttactgtgcattcgctaatacccacttcagacgagattagctattctattcttcaaacttagatacattgggatatatttgaatggaatttgtctaaatctgaatgtcactagggaaggaaattttattgttcagagatggaaatccatggagcctgatgcacctggaggggtgaagggtttagaaggtttctaggtgcgttgttttggagaggggtgtgtatatatatgatgtgcatttggaggaagtaagctgctacgtgcacgaggataaaagggagccaatatgcaaaccagagcatcaggacaccaacttgtctcttgtgcttgccttcctgaaaacaaacaaacaaaccaaaaacaaaccaaaatccaaaaacctcaaaactattttggcaactagttccatgctggagagttacaatggaattatgcaggacttctgggttctaaaatccactgccatgccagctgccaccatgcaatgaagaggagttcttgaaggcaactgttggggaagacctttaagacagtgcaacaactatttaccagctggtgcagacttgatgaataccaggcttgctgatatcttcctctagaagccaggaaaaaaatccatgttcatcatttaaaatgtcttagaacttctgtctggttaatgtttggtttgtccaattgtatgtgtcattagatgattacaaaaatgacatttatttatttatttgtttaggcaaaatcaacacttttattgcaagatggctcatctcaaaaaatgagagagctaaacacaccaaactggtcctttaaagcttgggtggggcttaggagtcacttcttcttcttcttttctttcctttatttttgaaatttagaaacaatcattttacatatcaatccccccattccctctcccctccatcctcccatgccccctaccaactctccaacccaccccccacccactacccaaggatggtgaggccttccatgggtgatcattatagtctgttacaacatttgggaaagggcctagggcctccttttatctgtgctgaaatagtatctctccatagggaatgggcttataaagtccatttgtgcactagggataaatgatggttccattgttagaggtcccatagcctgcccaggcctcctaactggcacccacattcagagtgtttggttcaatccaatgctggttccccaactggggtctgtgtactctcactaggtcaggtcagctggttgtgtgggtttctccagcatggttttgactgctttgctcatacctccttcctttctacaactggattccaggagtatggctcagtgcttagctgtgggtgcctgcttctgcttccatcagctactggatgaaggctgttcaggggatctggtttggtcctatgttggttacccagctgccagactggagtccacaagttcccagtttctgaggtcagctgtttcggcatggttttcccagtgtggtcttgacccctttattggtcactccttcctctctgaaactggattctaggagttaggctcagtgattagctgtggatctctgcttctgtttccatcatctactggatgaaggctctaggatggcatctagggtagtcatctctctcaacatacgggaagggctttcaaagtagcctctctactactgcttaggttcctagttgaggtcatccttgtggatctctgtaccattccctcgtgccagatttctctttaaacctacagtggctccctctatttttgtgtctctttttattgttctcctctattcatctccccactcaatcttcctgatccctcatgttcttgtaccccctcctcttctcccctcctctttctcctaccttccttccccttccccccatgctcccaatttgttcaggggctcttgtcttttctgcttcattgggggaccatgcatgtctctcttacagtcctccttatttccttgcttctctggaggtgtggattgtaggctggtaatcctttattctatgtctaaaattcacatatgagtgagtgcataccaagtttgtctttctgtgactggattacctcacttaggatggtttcttctagttccatccatttccctgcaaatctcaagattccattgttgttttttttttcctttctgcttagtagtactgtgttgtgtaaatgtaccacattttctgtatccattcttcagttgaggggcatctgggttgcttccaggttctggttattacaaataatgctgctatgaacatggttgaacagatgtccttattttatgaatgtatatgcctaagagtggaatttctggatcttgaggtagactggttcccattttcttaagaaactgccatactgatttccaaagtggctgtacaagttttcactcccaccagcaatggagaagctttcccctttctccacatcctctccagcataaactgtcattggtgttttttattttagccactgcatttccctgatggctaaggatgttgaacaatttctaaagtgtctttcagccattttagattcctctattgagaattctctgtttagttctgtaccctactttgtaactgaattatttggtgttttggtgactagcttcttccatgctcttggatagataggatcaacacagtaaaaatggcagtcttacccaaagcaatctatagattcaatgcaatccctttcaaaatcccagcacaatccttcacagaccttgaaaggagagtactcaactttatatggaaaatcaagacccaggatagccaaaataaccctgtataataaaggaacatccagaggcattaccatccctgactttattatagagctatagtcctgaaaacaggcacaaaaatagacaggtagaccaatggagttgaattgaaaaccttcatatggatgcactcacttacaaatacctgatttttgaccaagaaactaaaattatacagtgaaaaaaagaaagcatcttcaacaaatggtactagcatgtagaaaactacaattagacccatatctatcaccatacacaaaacttaagtccagttggatcaaagatctcaacataattccagccacactgaacctcttagaagacaaagaggaggtacccttgaacgaattggtacaggagaccgctttctgaacataacaccagtagcacagacattgagatcgacaattaataaatgagacctcctgaaactgagaagcttctgtaagacaaggagcacagttaacaagacaaaatggcagcccacagaatgggaaaagatcttcaccaaccccacatcagacagagggctgatctccaaaatataaaaaggagtcatttcttaatgtattcctggaaaacagagcagctgtgcagatgctcggagtgaaaggaagcttacaacgtgaagtccaggcagcctagggtaggttagaactaagatgttcagtgcagtgctgcagcagaaacacaaggagtgaggcttaaagatgctttgaacaaaagttattaacaagagaagatatctcttattccagactgataatgacaacagatttgcagctataaggaagatattgttttaatagagagaatgtcagctcacagttgaccctgaccagagcctcacagaggagccttctaagtgcctcctttaatttgtaaaatcagaatgcttacagtttattataggaggcttttgacataaacattttataaccacagaatggccttggggaaactactgagtgaaactttgtggtactctaacctaccttttcatatatgcatgtgttaaggtgctttatgcatgacagaaagatgttatagacaatcacacaatcataaaaatgttggtatgatggtctcgattcgtttcaacccaggtcactaatgaaaggaacatttgtctctcagtgttgtcttgttcttccagcaaggctcaggtagatgccactaaccactggccatatgaccagaaccctttcacaagtagatcctgtgtaactctttatgaacgcaagacagaggtttccctcatgaacagataagctgggaacttgccagcattagcacttctcgtgacaatgtgaagatatgaatcctaaaaggagaaatggcctggggagggaaaatggtaactggttagctgtccaggcaaactgacaggatcacaacagctttcttctccaaattctagaaagtttgaaatgctcccttttaaagtcaggcagttagattagcccctaactttggacttgtaagtttgaagctggcatttagaaactacttttactaaaggcattgactcctcatttggtccataaggcagaataaaagctttattttctcttgaaccatatgtcagccccagaattgcctttgctcacaggcgtgtcaattctctgtagatgtctatggaatagctcatctacctatctccttccccctcagaatgcaggcacagggatgagactagctgaggcaccttacccttgacttttcaatgtcctgtcccaaacctccaaaacagtcattgttatagactctcagccaccttatattcaaaaactagcaaagcccagcaattcacatcactcacaaatgagggcacttatctacattgatgacagtcgaaatcttatgggaaccagattggccccatggagcagtaaagaatctttttgcaaaaccagaattgaaattatgatcaatccattgcactttgaccgacatgcttaattatgcatacctctttccctctgccctaattcttcctctatgcaaactcatgtcaattcttgcagacttggagttcctagactgctttgtctgttctcctcctaatgtgccgcattaattaagtttcctttctctgctttccaccatcactcatctctgtaattggtgtattggggcaggcagctaaactcactctgctgggactcccagaactgaggcttctgccctaacactagttttctaattgcagtaattatctgcatcaatgtaagtaggaatatgagtttttagcatggtcttttctttgcagcatctacttaaatttaaatgaccttttgaaatggaaaacaaaacaaaataatcctatttttagagaatgagtcaagtagcagtcaagcagaatgagtcaatatcaggcatacaacatacctttgcatgccattgttccagatacagttataagagtcagtttactctcctttactactcagctgggtatacgcaagttgagtcaacagtaagaacagatttttccttatgaaaatcagtgagttccggaggagctccagagtacagtgattgcagattacctgtggggaatgtatcccaagatatcccatgcatccttgaaaccactgacagtatctaactgtatcattactgtgagtttcctacacagacatacttatgtcgtagttggcttcataaatcaggaagagtaagagtctaaaagttggtaataatatagaagtcataattatatactgaaacaagagttaggtgaatgtactttctctcagaatatcttggtatcttcagcatacaaaagttttcttttcctgattaagtcagttgcttccatgttttcactgaaaggaaatgcattgtgacttccctttggcattttgaaattgtaagtcttgccactcttacactcccagattttgctgggtaaaacaaaggagatttgttgacagtaaatctgatgattaagatgtctgtgaaggggtccttaaaactctttcacctctgactgcttgatgcctgagaaaatgttacaggtcctgaatatagaagtatgtaacataggtatacaattttcaaatattgaatcatagaaaattattttaaagcaattatttggtatatatatatatgatcttatcatttgccaaagatgatacaagtttgtatactaataagataggcatacttgctttttccaatgtgaagagttgcctatttgaactggagctatggctcagttggtaatgtttagtagtgaaccttacatgaagccctggatctcatccacagcactgcattaaaaaatattagtgtggtggtccacactttaactattccagaacttatggtgtggaaacagggggatcagaagtacaaagttattctcagtgacatagtaaactcaaggcggcacctcaaaaaaccaaaacccttccaccttggctggatatttgctattataggacacagaaaatcattaacatttcctaatactgtatggtgatatattgtttgtgatctaataaaactttcctggaggtcaaatgcaaaaccagccacactagttagccaaagaagctagacagtagtagtgcacacctttaatcccaggactcaggagacagagacagatggatctctgtgagttcaaggccacccagggctacatgagagtgaatcagtctaaaagagaaacagagctctagagctttaatcccagaactagagagaatatcaggagctcagtgcagtctcaggcagcagtctgaggtgtggtgaggagcagggcagtctggagatgcaatctaaggctcaatggatcaccccttcagtctgaccattgatagaggtgagtgctctctgttggcttggctactttgcttctctgatcttcagcttgaaccccagtatctgtctctgggtttatatcatttgtgctgcaactttgatttaacaatcactaattccaagaacactgctttgtataaatagaaaagtacaaaatggcagaagtatgttaatggtcatttcattccagagactgctggaaataatatctgaatccaaagtaaaaattaatttaacattttttattaaactgaaactagtgactagggtaacaattttaaaagtcaaatatacccaacataattcaaaaacatagtaataagatacttaaaagggaatgatggtaggaaaatactgaaagtctctgttttaaatgatgatgtctctataaaagaccataaaatctttgtggaaatactttaattcataatatatttatagtctcaaaaatgagttgaggtgtttcaggcaacattcactgatgttctaggcatgactgtatgtatggcctgaggtacatgtgtacatgttaagaatctaggctacagtgaagtcacatgatgaaatataggtaagcactgccataaataccttgaattcattacacattttatttaaaattatttttttgtagtctgacatcaagaaaccatttattactgctattttttgttaggccatattcacttataggaaaccatgtgaggttgctgaccactgcttaggtgtcagggccaatagaaatggctccattctatcttgacttaaggtcagagagcactcttgctctttcaaggttaaacaagagaatgtttggcctaagatgtggctattgtgtgtcttgccttgacaacaggatatttggcctaaggagtaactaatggatgccttaccttaacaacagaatatttagtttagcgtgtggttacttgatgttttgtgtattatgaaggtaattctgcttgcttcttctgtgtatcttggtaaggaagtcttttgccttccctttcttttgattagagtatgtaagagttttgagtaataaacttggggctgatcctaatattcactgggtacacttctgactctatctctgtgtctagcctgtttctttcctcaatccacagtagtcctccttccaaccatggacctgactatctggtgggaccagacagatgacccctcaaagattacaacatttaggactttgttctgacctatgaataaaagcacacagtgtggctatacagaatcaaaggagtgatctgcctccttgtagagtggagatgatcacacaagatttttttcaccctacttagaccagcacacaatctggaacttttgaaatatttatttatagaatgctctccttagtattttaggactgtagctggtggtagaatattgcagagagcaaaaacacagaaaaagagcctgtgtgggggacagggaaagtactgtaatatgtttctaccaacaataggagatggttgtcaagtacattggatgatctctgagttgtcaacttccactccaatctaaaatagtgtttgaacacaatttgtattgaagccatccttgcttattcatctattcccttcatgtccctatgctctggttctggctactttctttgccatatgtggtagtgactcaggacatatgataattgtataaaatttctgctcagcaaattataatggtctctcttctctaggttgttatctccaaactaacaatacattcattcatttagcaataatttcatagttacccctattggtggccaatatgccaagtattgagaaagcagccattaaatatgttcatagaagttgttcattctattaagggtttatagttaatacagatgtggtgagagagtaatgagggcagctgagtcctgtctgcacatatgacatgacggcatagcatagttttgaagaaggaggaggaggaggaggaaaagaaggaggaggaggaggaggaggaggaggaggaggaggaggaggaggaggaggaggaagaagaagaagaggagaaggaaaaggagaaggagaaggagaaggagaaggagaagaacttgaagaacttgttcaagaacaacgcaggtactgaagctgctcccaggaactgtaagcacctataaataagtccattattgctgccccatcagggactcaagtttgcatgtatcttttgaaaagactgtagaatgattctcaaatttcccacttaagatgggaaagacaaaataatgcataacttgatacctgccctattccaccccaatattatttaaggcaagcctgtgggtcagccactgttctaatttgcagatttctacttagcaagcaagagcaacatacaaccattacattgtgaggtccaacactttgaaggacctgtgtctggcagctaagatcagggtgaagtcaaagcaaagaggctagatgaagatgctgtccttttccacttctcagactctttctaacatcacaccaagtctatggtctgtgaaagcggtactttgttctaatctccacaaatgcttaacacacaagtgttaatgtaacacctcaagtttctgcaactttaactggtcatcaaagcatttattgtctccttccttaaacattttttttagctacctttattctgtctgctttggctgatggcagtccacccttcattcctgaagagtttgctcttcaggttcatttttattgtgtgctaaatttactataaatatttgactagtgctctcattggcattaaggaaaaaagaactgaccgatatgttccagatcattttgcagccacatgttgtagcatcaaggggtttttcatagcattgtgtgtgatttttgatctttctgattttgtcattagttattctccaccactatgagttgcctgaaatgacttgatagagtttctgtttcaagtccagtggaattcaaatgcttagctttgaaaagcagacattgggcatttggaatacagaaccagcaacatgctgtaacctgtaccccagccattgcttcattatggatcttctcttgaacgatatagcatataaaaggactgatgggtcctgggatcatgtattccatctcaccatcactgaactagaaaagatctcttactttgagatgagagagtgggctgccctatgcacctgattatttagtgggtctatgtgaactgtggtaatgccaacttaagacacaatattctgcattttgttctgctatgttctgctttgttctgctatgatgagagccagagctgagactgaaaggaacacaaggaatacagcactgaattatttgtataggttgctacatttatccccagatattaagtctatttagagaataagctacaacacattaatcttcgtgtcaccagaacttagcacagtgtttggggcttagtgaagcatgtatgcaaatgtcctagatattcttttggcctacccatctcatggataaaggggaaaataaagattgatgctggaaagggacttgtataaatgcgtctgtctaggtggtggcaaaggcaagggtagtttcttagtcagactcaaagccacaaatcatcatgccatgatgttccttcagtaaaatcacactggagactaagcctaaattttaatccaagactacaaaagaatataggtatctgaacataaagatgaatcacaagattatcaaggattataaaatcccattaccaccaataagtaaaattttttatattttttcactaaaagatgcatatcaccagctgtggaaaccatctctcagtaacctgccaaaatgatatacacaggaaaagaggagaggcgcccactttgtgttccccaggccttttaggaatcacagagttagtcagatggacacatatgaatttacaaaaagggtgatattgatgctatcaatgaaatgggcactgctgaaaaagaagcactccttagtattatcaaggcacaactggaagtgactacaacatctctcagcatgttgtgaatatcattatagacaggcaagtaaaggcaagattcttgccaagagaatgaatgtgtagattgaccatattgagaactctaggagcagagttggcttcctaaaatggaaaggaaaatgatcattgaaaaaaaaaaggaaatcaaagagaaaggcactaggttaaactaaagtatcatcctatcgcacccagagaaacacattttgtgataattaccaagagaagctggagcatattccctattaattcatgtcttcccacaaaaaattaaacaaggacctagattataaacaatgagtaaatacataagaaaggatgcacacctgaaattcaacaggaggcaaaatattcctcaactgggtatgtacttctatgcatttctgataactttatcccgctttgtttctcatgaaaggacttaaactaagcagtggttaaggttggtaaaactgtagacttgaagaaggtgacagactgataatttcagagggaagaatcacacttatataaagagcaaaatcttcactccaatcagggaagcaggtagcctaactgcagatcttcactttttcctactgtcctccaaatccatttccctagttttatccccagttccatagcagaccacttactgaagcccccactccctccttgccccatctctactgggtcacacaggtcttcccctcaactcccttcctcttagtcatcactttatcccagcccccaactccaactggcattccctgggaaaccacagcacactccacccaaagaaacaagtaagctaactacagatttccacttctcattgttctattccaaaccaaatctctcagtcccatccccagctctgatgcagaccatttgttgtggcctttcctcattctttacagcaagaaataatcaaacagtgcagaaatcaataaaatagaaacaacaacaaaaaacaaaaatccaatgaaacaaagagttctatgagacaatcagtaagattcggaaagccctatccaaagaaactataaggtggaaagagactatttctacttacaaaatcagagatgaaaggggtcataacatcagacagagagaaaagccagagaatcataaggatatactttaaaaacctgtattccaccaaattggaaaacttaaaagaaatggataattgtctcaataggtaccaattaccaaagttaacctagataaaataagcaggtaaacagatctataacccccagtgaaacagaagcagtaatcaaaagtctcccaaccaaataatgtccagggacagacagttttaccacagaattcttccagactttcaaagaagagttaacaccaatactactcaaattattctacaacatagaaacagaagaaacattgcccaattaattttatgaggccacagttacactgataccctaactatataaagattcaacaaaaagagacttacagaccaattcctctaattgacatagatgcaaaaagactcaataaagtgtttgcaagctgaatctgagaatacatgaaaaaaaaatcaaccaccaggatgaagtagttgcagggatggttcaatatactaaaatcaataaatgcaatctatcatataaacaatctgaagaaaaaaaccacatgatcatttcatcacatgcagaaaaggcttgtgacaaaatccaacaccccttcatgataaaagtcctggagagttgcgggatacaagggacataactaaacatactaaggtcagtttacagcaagcctatatccaacatcaacataaatggagggaaatccaaagcaactccactacaattaggaaaaacacaaagttggccatgctttccatacttattcagtatagtacttgaagtcttaggtagatctaagacagctgaagtataccaagggaataaaaattagaatggaagaagtcaaagtattttcatttgaagatgatagtatgcattaatgaccctaaatattctactaggaaactcctacatatgtcaaactctttcagtaaagtacatagatacaaaattaattcaataagtcagtaactcctatatgtaaatggcaaataataaaaagaaatcagggaaataacacattttataataatcttaaatgatataaaatgtcttggggtaggtaactctaaccaagcaaatggaagacttatatgataaatactccaattccttatagaaagacattgtagaagatatcagaggatggaacgaccccatgcttgtggataggtagaattaaccattaaaaatggccatcttatcaaaagcattctaaagactcaatgctgtccctatcaaaattccaacacacctcttcacagacctcaaaaggaccaatctcagtttcatatggaaaagcaattaaaaaaccatttatcaaggaaaacaacacaatttaaaaatgaggtacagatctaaacaaaattctcaatagaggaaactcaaattgcggaataacacttagagaaatgttcaacatccccagtactcatggaaacacaaataaaaactactttgaaattccaccttacacctgtcagaatggctaagatcaatagaacaaatgacagttcatggtggtgaggatatggaataaggggaacactcagccattgttggtgggagtgcaaacttgaacaacctctatggaaatcagtgtgatggttactcttgaagatggaaattgacctacctcaatatctactactcttgggcatttgtccagaggatgctgccccctaccatagagatacttgccaaccatgttcattgctgctcctgaaattggagacagcctagatgtcccttaacacctgaatggataaaggaaatattgtacctttacacagtggaatattactcagccattaaaaatgttaaataatgaaatttgcaagaaaatggatgaaactagaaaaatatcctaagtaagataaccaagacagagaagaaggcaaatattacatattaacttatatctggatgattacttttaagtcaatgataaccaagtcacaatctgaactaatgaactactgaagtaaggtatagaataatgaacaggagtggcagggagcaaatagatctccacagtaaatggaaacaaaagataaaaagctatggctgcatggctggggtgtagaatgggaggatcaggtgatgatgggaaagtgagaggggatgagggagggaatacagagagacacagctaaacacaagggtctttgaaggataatatagaaacctaatcagtagaagcttcataaaacttatacatatatgaaagcaatcttaatgaaatagttaagttaacaggagagacagagtcccaactagccaccacttttcatcaaaatagcttctggtactgggactgagttacatctaatggagttgtttgctaaaggggtctcatagaaaccccaaacaactcatgtttttgccaaggttataagtcactacacagagagagggggggggaagagacacagagagaccgagagggtggagagagaaaaaaatctcattctatagaacaaccagcagtttttagttaatgacataagatcatataccacgactccacattcttgctcttgagtaccttgttcaaacaatgtctcaggtggatctgggaaatgtgatttttagctaaacattgtttatctcagctgccccccagtattaaagaatgagggaaagggtcatcattgacattgtggttaagattatgctaaatacgtacggttgactacagtaatgcaataaaattaatgtttgtttcagtatcatggatagttcttaaactctgactgagtgaaagcttatgagaatgaaaccagactaatatctatcatatgaagcagatataatatgtacataactactatgaacagaaatggaccattaagaacaaaaccaataatgtgctagttcggaagctagagctacattctaaatctagttctggccatgtggtctactgaacattacacaaatgttctaagtactggtcgcccaatctgaagctataattacaacatcctcattttggggggtgaaataagcttttctatttaaagcatatatcactatgtgcttactacatagtacatttccaatacagtgagtgttataaccatgcttttcttattggtatctgttcagtgtatgatttttgtctctgggtctcactatgtagctcaggatggccttgagctttctttcatggatgccatatctgactgttattattagagagttgacttgaatgtgtgaggctgagacttaggacaaagttgagtcttggcaaatattggttggatacacgattatagaaaaaaagaatgtgctgaacacagtccatgaaatgagctggagagtatgaaagttatacactaaatatttgcttaaggaactcttgtgtgacaggcccctaggatacaaagataaggaaaaattatcatgatatttgcctaagaaggggaaaggcaacatccaaagccacataaatggatgagaaactccagctagcactgctacagtgaaggggagggggctcttctgtgtttctgtcatgtagcagaggtacttaatctacttagaagagaaacaagaggaagaagtaacagttcagcatgactttctgactgtactcatttatttcagcacaagttttcctataagaaaagccacttaaatgtttcctggaattctatccctctgccatcttctgtccccagatgattgactaaactcctaaagtagaatgatccaacaacaacaacaaaaaaatagtgatgccaagattctccaaatatactaaatccttcttgttacacctttgtgtgaactttcacccaactccaggtgctttctttgtaattttccaagaattacttttatctgcctattaaatcccccaagaaggctgcaccaatagcttcatttggggttacttcttttcctctatgtcctccacatctgagttgaacatgcacacatggtactctttgttcttctttccccctggcaagacttgtaaggtgtataacaagctttcaaagagctgagtctcatcctgacttgagctgagttaaagccagctggcaccatttacctcttcaaatgacaagagaatgtgagaaacaacagggtgtctatagggggctgggcggagccctatagggcagctgcatgtggaggagtgcagcctggcagtgagttcgaaaattgggtgcaaatccagaagcttgcacttgacagaacttagtttattgtgacttcatgatcaaactttgagattcatctccctctccccaatggctacattctcattagacatcaggtatttccaaaagaatgataatcatgacgggtgagggggaggggaaatttgtctcacatttgtgctaaaagtaaagacaaagcacttgaaggttccctgaaataccagtcgatatttaactttaagtactccaattctttgttgttttgttgcattccactgtatcaccactcatggatgtaggctgatttttacaatgcatcaccttaaggagaagcaaagcctccttcataagtatgagtttaatatcttagtcaaaactcataaaggacttttatgccagagaacatgttataacataatctatttgaagccacacgtggtaagattagccaagataaatgtatgcatggtatttttagaaagtagaaataactagaaatctcttagcacttctttttgtgtatgccttagtgaaagaagaaattacataagaaaactagtaaatgctaaatctgtattattagaaaggaggcataaaggtacatcctagaatagatttttcatacatattctcattactgcattaagagaatgcaaaaactcaaggatgggataattcatttttaaacacataagtatagaattctagggagctgactaaagtatatattattttgacaaatgtttgtacatttgagtaaatagaaagttttggtacttatgacttgtacaggcactatttcagggactgtggaagtaatagtataatttcaaaaaccaggacagaaataaaaaactatgcgctatgacggagtcttctaagagactggaatatatatatatatatatatgtgtgtgtgtgtgtgtgtgtgtgtgtgtgtgtgtgtgtgtgtgtgtctttatttttttaatgtgggacaaatcttgtaattacctacaagtcaacataattttgatacctaggcaaatggtgggattaaccatgaggtaccacaaaattctgggttaaaaaaaatcaacattgctttgcagaaagagttttggtagcattgttcaagtctgataaaaatgaaatttatacaatggaagtatatatgggttcctgggggctttcttttttcctaccctctttgccttgacagtccaccagggaccaccctagcatattgctggctcagcagtttctaaattccattttaaaagtctttaatattcttaaaatttttgaagaactcaaagaattttcttgatgtataacatttaatattttcttactggaaatgaaaactgaagaatggtaaagtacaataaatacaagaatacaccctgtaggacaatgactggcagtgttatcatacatcaaacagcctttggaagactccactccatgctcttgagcaagaatgaagaaggtgaacagactagtatgataatgaaagcagtctcaaccgtagatccttggtcctctgggctgccttaagacacagtctgggagcctgtgtgatgagagttggtagctagagggtgatgacttagtgagaggggcctctgggaaaatgcatgatgcatcagcaagcctaagggtgagcttggtctgattgaaagttaaaatttttcttaaaaatccctcaataatatcttcaggcatatgtttttcatttaagaaataacgtgtcatctggaaagggaagactagggagaagaactgataaacattttgtagttctcaacattaaataggaggtactggagagatgagaaagatctagatgtgatactatgcccagtatgttcataattcagagaaagagcagattcaggctttcctaagctcagagcaaaatccccagacaactcagggaagagagggattaattctgttgagccatttcaggaagattctgcagaaaggtgacattgtgaccatgtatatgcaaggagtgtgcattataggcaagagtgtgcaaggcagtggagttagagtatggtgtcacagacaaatacatagaatgtgagttctaggaagggagagtgtcccttagtcggagccacaggaatggcgacagatggggtgtgttgggatagatggtggcaggagaattgagtcttatttcctctaatgaattgtgttgcagaaagtcaggtcagtaggtatgtagagatcaaaggaagaaaaatcaggctagggtctgggaaacacttcagcgcttcttgggcagactaagcatgaatcaagtgatactgcaaagacttcaaaatcagcctgcctggattcaaatgataatttctccctaggttttgctttgaatggagggtgagaacttgaacaattaggtaactaaagtcctaatcctcagagttaaagagaagtgactaaatgacaaaaaaaaaaaaaaaattaaagagagtaaaataaagggttaacaacattgacccatgacaactttgtgatgtatctagttgacattatagatttgtaaagtaatggaaaagatgtccacagagcagaactcacaagattttttttcctgtggaaatgagtggatggtggtgagagattggcatgattttaagtgcttataccaagagaatccagggtactggcagatgaaaagtaataaagaaaggggagaaagggcactccagaacacagagaaacgaagatttattttcacacaaatacttcttacaaaaatggtgggaaatgctaaccaaagcaacctcacatgatgtgaaggtgtggtgttgctgactgaggatggagagtgtccaagaagttttaagaggcaagatgaactaagctacttataggaaatttcacaaaccaaaccaagagaggaaaagggcacctagccctctagcaaaaacatttaattcctcattaaaatcaagtgctgtccttgagagttggagagtggcatgtggccttatagaaagaataggtagaaatgaatagagtaggttagatttaagagtgaacaagattttttttagcattaaaaaagaatgaaaaaagatataactgttgtattacagggaaaagtactaaagtctaggcagccaaatgacttcatctaaataaatttctcttataataggttagacttgaaataataatattaagtaaatattttatttatctagatgataaaagggttataatttaaaagaaacataaattctctaaatgttggggaaatctctttggtctatcggcagtttaaactggataagtaaaatcaagaatcaagattccttttcaaatacaaacaaccagggggtttgtatctgtggtatcagaggtgcatgtaaaacatgctctggcttatgttacccatttgcaaagacatagcaagattctcaagaacacaattacttgaagaaagaaaattcctaatctcataaaaatgtagaaataagagagaaagaattaaaccaaggacccatgttatagtaatatttctgaaccacttatttcttaaagacaagggagtggtaatgaggagcaaagaagagtcaagtgaatttagaatagctaacaggactcagacaattaactccacattcagatattgagcatgttgtattatatatggattaaaaaatatgaagagttctgcattgacacttcaattgaataacttcacttctcccaatacttgaatctattctttatttccagagagacttacacatgtcctctgaagggtctatcaaattcaaggctgctctttggacttacagttcatcataggtatgcctaggaaaactgtatcttccatctccttagtgaaataccattgattatctcttcaagtggaaatctggttcataattttcttggtaagtgaaaaggaggctacccaagggtgctagtgtccttgctcagtctgagaaccctccatctctttggattctggttttctcccatgtctgcagcacatgcacagaaaccctctttgctggtatgccctccttggggttataaagtgggtgagatctttctgggatctaaatataaaggaaggcaattttaacatattgtgtcattaagaagtttaggagcttttagacacagtctggaggtagtaggaaattagatgcagtgttgcattagacatgtttttagtattttcttctttttgtaaaagctgtaattttcagagtttagaaccaatttaatgtccctggagttacagctttttgtatccattgtccattaggtgaattactaagccaagaatggaatccatttataatgtataaaatactgtgaaatgtcttaaaaacagtctttgcaggggaaaaaaaacctttgggagtccattaaatttgaagacagtgagttctgaggttcttataatcatataatggttttttgtgctttgataatatgatacattagatattggaagatttatttaaaagtttgaattcaatgagaaattacatagaatgaagggaaatgcattatttttggcattttagacacattttaaaactgagtatatttcctaaaaagtgctttaataatatttattatattttaataaaaattaataggcactaaaatgctatcaaatgtctcatctatgatgatgtcattatcactgacatttaatgacttagaaccatttttaaattcttattttaaataaattcaaatgtggtctgaaaataaaaatggctgggtgcatgacaaatatcaagtgagttgaatgtgacatacatgtacatgttatgtgagcatatgtatatagtttttacatgcgtaaacttgtgtccaattaccacatcctaataaaatatattgaagatctgtgaatatgccagttcagtacattggcactgaattgctttgaggtcccaatgtataattaatgttttgctaaattttaacattatagtggagattttcagaataacttgatggtttaaaattcttgtttattcaaaacataaatcaataaaactttcaaatgtattccaagggtgtattttatgtcagacataacttttgccataacgtatactcatgaaggtggtactatgtgagattcagagccttgtgtaattgtcatttatatggtcaaacccaggtgacaggcagctattctataaggtttaattcaaaagtaattttcagtgttctagaaaatgagctggtgctactgcattatggttgaagtgttatctctatcaaagagccaaatcacacttttattgacaagcaagaagagaaatgtgcatgtttatgatgattctcgtaaaaattgttactaaaatcaacttccctagctaattattaggattcacaaacaaaatttctttacctatgtcctgataattcctgcagatgatgtgtgttaacttaatgtttcttgtgatattagtacttttgatactgacaactaaggagtttattagagaagctattaaagtcatgggtcatcagaaggacaatagcatgccaggagctctgagatgctcagagctcagtcctagtataagaaattatgatgggggtcagttggcttttttttcttcttttcctccagcctcaaattactgaaaacctatccactcacgactggaatagatgcaaattggttttctattctcataacaaagtctgagtagaaagccagggactggtattatggttctgagatgtgaccatgcctcaacttcaaccttagcttctcatcagcatgtttcgccttacagctatttgataactgcagcatctcacaaggagaaagaaggcatccctggaccaaccctggaccagcatctctgagccctttcattaagacagcaaatgtttatccacaggtcacagcttgtgctgcctacggtcagggaggggtcatctgactatacatgagcatggctagaagaacacatcttgttctttttatatactttagccaagttgacggaagggagatgaggaaatactaggacaattacctctcttgttacagagtagtcacaaaataaattataaagaattaattagtagtgtatagttcgttttaattttcttttttaaaacaatccaaatgtaaggttttcatggggaaagagtaaatgaataattaaatcattaaactaatggaactcttaaatggcacacaaatcagttaatgtagagcttggcaacagctcgctctcattgaaatcaaagaaagttggttactgtgggagttccttgtatataaaagagtgggcactagatgttgagaagtagatacacgaattacaattatgacaaatagacattgaaataagcaccacatttatactcagtagtgacagacagcactttgatgttggattgagaatagtattgggtccacattgcatgcagatttctattgcagctcaattaattaactctgttttacttcatagcatttaaagttatatctcacttattgttcatctgaggctcatatcatccaggtgaggttgctgaatgctatgtctgaaagagacagtattgaagtcactgagacatcttctagttgtgtgggccttcaaaaattcaagttgacccttgtatctgagaaagccatgagcctccatatatcctggaaagttgtttatgatttttccatcatcacatataattttatacttccatacttttaaataggactgataccccctaacgtctgctttctctaactattgcatggccccatcaggtcttgagatacaccccacattgctatcccaacaactctagagaaatcttcctgtgtctattatcaagacaatctagcaactattctctttctctatgaattacctggaggcatccaatttgaacatttaaaagactagtgccaaatatccatttctcacacagaaatagagttccaagcttttagtgtgtcttctaggtttggtatcagaatgtaacacttcacctgataaaggaaataaggcttacatcctagaagaacttaaaaacactttcttactagtctgctctctttaatttccctctgatctctaattatgtctttgatctgactgtaaggtacagaagtcatggaacagattccatttgtaaaatctgcatatggtgtgcttattggcagaatctttatttcccttgtaaattctccatattggatgtgggggagggcatattgatgtctcaatgaaaataactaaaacagaaaagattttatgctgttagaaagaaaatatggaaggaaggaagaaaggaagggaaaggaaggaggaagttcattcttagatatcgcttgttcatatttattttgtgaatgttgacttcatatcaaggcagttacacacatacagtttatagactatcagcttcactggtgaaatctttaatttatcttctgagacatatcctagcctcctttcccacaatactacagttcccagaattaacaaaacagcttagaaaattccttcatttgaacagttcataggtctcagcttgcagggttctaaaaggaaagactatttatggatgcccagacatgagagccaacctcagcaacaatgcacagaaactcatgtgaagttaaattggcaatcagctctagcatttcttatggcagagctgcctattgggtaaataatatgcattttataaaaacattcataaatgtaaattcacacaagagactgaaatggctccttagggttaaatgaaatacatattaacaacacttatgaatagtaaatagcatgcacttttaaaatgtactcaatgtgtatttacataatagccgataagagttctactgtcaagtaaataataccgtagctgcctttaaaagtctttaattacctacagtatttgcaaagtacattgtaatggatttctggtttgtgtagcactccactcacttcccttttcttttcttccctggttttaaatacacatatatatttatgaaaatgattttaaattggcactgaaagaaaccacctatctagggagaatggtcttcaatggtttcacttatgtgaaagggaaacttttaaagtgagatgctaatatcctgctgacattgtgcccataaagaacatcttataaatcaaaacaagtaaacaacggagagtaccttggtaaaaggaactgatattctagccctttcctgtgtgtttgtgggctttgctatatctcagattcattccaggattgggattcctgaaaacagtgatactcagttactaactagtttctcgctcctttagggcaagagagggtaccagctggaggctggacagcaagatccctcgtcatctctctgcttctgtatgtatccaccaacaaccactgtcccaattttcagtttaccccctaaggtctggaccctgtgccctggactccagtaacaccgacttctccctccagctgtcaaggggtagttgcttcctgtgatagttaatccatgttacttcatctctctgttgggcttcagtttgctagctccgaataaccttgttcccatgataacttgccctactagaatcccccagtatgatgagctttgtttctctggggttctttggtgagaaagttggtgggtgaaaatactccttcctgaagaagttacccaggggcaaagccagttcagtcaaagagatttgtcctcttttccattctctgcaaagtgtttcctgtgacattgcattaaggctcctagcacccaactgcaatctacaccttttaaaaaggaaggatgcaaacagagtttacacttagataagatagatgtaagttaaacatggatctagaaattgccctgatgcaaatactgcttgcatttgaccatttgatcgtgccttaccactcagagctgtgactctaaaatgtgcttcttgctcatttttacttcagcacctctgaaccattcagttgtgattgaaatgatactggaatatgatatgaaacagaaatcaatgaaaagtagaagaaggcatcttgataacacaaagtgtgtgtcttgatgagacacagcctttgtttttaaactaataactccacatgagccatacagagcagaactctggttccttctatattcatcctttccctgtgacactttccatatccaggatctgtcctgttcttgtccttaggatttgtagtctctagggtctttcccttcagcctgggttccgtcaaatctactaaccctttctcactacgagaaaggtcatccccactcactctgtttgtggtcttcccatcctgtcacaagaatgacatttgaaaatccactagtagaaaccctctgttttgaaaatgttcataattgcactcttaatcttattttattaataatacaaatttgcactcattccatgttttatttaatgtttacttcaagtatcactgtagctaggtagagggatgaaggaagaacccacagtgcttcccgggagaaaggcactgcctttggtgtttaattcatttttcaatgtccccactgccccaaagcttcacttgtgttttattgactgtgactgagaacagttctcctaggaggaagatattgcatcatctaggaaaggtaggaggtggggacagatagggaaagacattgaaacaatttttccagctcatggtattaactggagctgggaattttcctagttagtaaagtggctccagccttctggatctgggagtgttgagggaatcatggagtctctcttgcattctatccatatcagctgtgagtggcaacatcatgatgtaggaaaggagctatattgcctttgcatagcatggcacttccatcatttgcatattatatcttcaggggctccatctcttctctgcccttcaataggatccaagcatccggaaacaaatggaaagtctttctatcctttcatcaattgatattcaaagttcacagttttgtttgtttgcttgatcaacacagatatgaatataaccataggtataggcatattatgtagctgagggtgaccttgaactcctgatctttctgcctctacttgccaacttactttaagtgtatctttctaccttttttaatttcaagtaagccattataaatccattcttagacaagaagggaaataaacaaatataaatgtttataaaattaatagtatctagtgtctagggagatgcttcacttggtaaagtgtttgctatgcaaacatgaggaccttaattcagatcccaaacacatataaaaatcagcatgtgatggtttgtttctgtaatcccagagtctagaaaaaaaagagacacgtaggtctctggagctcactagccaaccagtatagctgaattgtcctctccaagttcaatgagaaactctggtctcaaaatacaaggtagaaagtaagccaacattgacctctggcctatacatacacatctgtgcgtgctctctctctctctctctctctctctctctctctctctctctctctctctctctctctctctctcacatacacataaaacaaaatagtgtttgaaactatgtccacccatctaatgccaaagttaggacagaaatcccgtggaagcatcctacagctgctgactctggaacttcagtgatcatgcccggaagcctgaattttcaggcttccatacaggtagagtctcctggcaataaatcccaggtaaaatatcactcagatttaagggtggttgaaataccactttgtttcacaacaaatccaatttttatctagcctttactttgttctggtccataggcagtctataactgaaacagtcagagttaagtatgtttgaacaaggtccaaaatgttcaggcttaaatgacatagagtcaaaagatcaaaaactaaaagtttaaaaagtaaaatgcaaattctcccattttttaacaatcaaacaccaactcctcagagcctgatccagtaacttgtgacacttgatacaaacaactaaagcctaataattttttaatttttattttgagattaaattttaattacaacttttctctctttccacttgcctctccaaactctcccatgtacttcactatcctacaaatctatggcctcttttttcactagtcattattgtataaatagatatatatatgcatatattcataaatatagcctgttcagtctgtataatgttactgtattattttttagggttgagcatttggtactggacaaccagttgatgtgctcttctctgggaaggaccacttctcttattctcagctttgttcagttgcttttgtatagtcttgaggcctcatgggctttcctctatccagtttagcatgttcattggtaccatccctattcagtaaatgtttggatagtcacattgggacgactttctgggtatagtttctgatattaataggagatacaactagaacctgactgttaatggccccagtgtctcatcaaaccatcaatctcagagagaaaaaggaatgttagaatatttactacagcaaaagaaagtgagctgaacactacttctctatttaaagataactcacaggagtggcctgggagatgatgccaagtaacttctaaattctgaaaaggggtggatctcttttgatttcttctctgggtcttctccctccctctctccctccctccctccccccttcttcttcttttccttcttctcccatttccttttcttctccctccccatctcacaattcatctgctcagctactatctatggtgtctgctgttttaaaacatttacatccattctggtctggtaagtactttcacctcaaatactgaggctcatttttttttttttttgcattcaatggcagcctgcatgtgtcaccattgccaatgctttcattcattgctaacctatcattcttggacctaagaaagttgtccatggcataatgtttcccagttttgaaatagttttacttccttatctatgtagcattctttttatctaaatagacataaacattattacaagaataataaactaatgttttattaaagtaattatcagaaaaatgatattgaattttatcaatttgctatgctcatttagagagatatttatatgatttcttttttaaagactttaatataaatatcccatagatatttctgtattgaaccattcctgctgttctacacaaagtccatctactagctgggcagtggtggcacacgcctttaaccccaacacttgggaggcagaggcaggcatatctctgtgggatccaggccagcctggtctacaaagctgcacagagaaacacactgtctggaaaattccaaaaataaaaaaatccacttacagtgcattatttttcagtgtgtgttgagttttatttgacagtatttcgtttttactttttgtattaagatacatctaaatgtacacaaaggatgctccatactaccacaaggacacttgctcaaccatattcatcactgctctattcacagtagccagaaattggaaacaacctagatattcaacagaagaatggatagagaaaatgtggtacatttacacaatgaagcattactccgaagtttaaaaaaaaaaaaaaggcagcatgaatttgattgaaatagatggatctagaaaaataatcatcctgagtgaggtaacctagatacagaaagatgactatgatatgtattcatttaaatggataagacaaaaggctgttgataagacaaggctgctctcggcaaactgacagtgggtcctcactgccaagaacaacactcacacaactcattgaacatacagaagtcacgctggtgcctgtatggagccctcaaccctatgttctcatctctttagtgaaggaaggtactctctaggccactgaaaatagaaacatggacaccaattcaacctcaaaaactttgaccaataatgtgtcctacctgtaaaatataccagggcaatggtgggacagaacttgtggaagtagccaacccaatatgtggtttcatccaaggcccactccatgagaagaaactcacactggacactggtggataatcaagaaccagagactagatagcccagagatctagaataaaaccaaacactattgttcaagaaagtagatttgtgccttattcagtcatcaacagagaggcttcctctggcagcaaatgggaacagatgcagagacccatagtcagacatatggagagacagtctgaaatggaggtctctatcaaatgcctcccttcagagctcagggaatcctgaagaataggaggtacaaaagacggtaagagccagaaagcatggaggataccaagagaacaaggcccactgaaccagctaagcaaggtgtgtattagctcacagaggctgaagcagcaatcacaaaaccaaacaaggtctgtaccagttcctctgcatagatatatattatagataatagctataatagtataatataattagtatttatacataactcctgactgttgagaacaaggaggtctctgactcttgtgcctgctcttggagttctttcccttctgttaggttactgtctccaacttcaatatgatattcttgtttcatcttactatattttattttgtcatgtttacttgttatctcttagaatactgttcttttctaatgacagacagaagggggtggatccagaggagagggaggtgggtaggaactgggtaatttggaaggaggggaaactataatcaggatatattatatgagaaaagaatgtattttctatttttttaaatgaaaaaaaaaagagacaggtaagaatgatgcttgtatgggtgtgtgtgtttgctgatttatcagttctaaaaccagcatctaacttaggcagaaagactagaaattactttttaccttaaggtcaagaaaggacacttaggtagcactgctaatatatattataggtgtgaagaattaaaacatggtaagagtctgtatttgtacatgatatgacagaacacctggaaaatctttgagaacaataagcaacaaagttcatacaaacaataagcaagtcacaaaactgaatactaaaataaacaaaaaaatcaagtctgatagtatatgtaaattacagacagctagaagatatgatggaagacaactcctacagtaatgtaatttttagaaataaagttagcatgaaatagaaaagagttgtatgacaaaaacttcagggtatccttgaaatatatataattacctttataagaaagcatcgatgtatttcttcataatctataagttaaaaaatcttttctagttctcataataaagaaatgaacaaaccaaaatcagacaatgagagaaaaggttgctacattcagtgacatgagaaaaaaacctagtgggcaggagggatagctcagctgttaaagactaggctcacaaccaaaaatataagagaaagaacctggcatctaaaatcaagatgacggaagtgcctgctggcctctgggacccttgatagtccacacagtagtaggctgccaaaattgggaagtattcagaacactacacttaaagacagaagttagtgcttgcagtagtcaggcaatgttcttgtagtctgccaatgttctcacactgcttaccttgtcttctgtaacttgcataaagttcatagcagatagctttaagagtctgtcttagtcactgttgtattactgtgaagagattcatgactatggcaactcatataaaagaacgtatttaagccaggcattggtggtgcacaacttgaatcccagcactcgggaggcagaggccagcctggtctccagagcaagtgccaggataggctccaaagctacacagagaaaccctgtctcaaaaaacaaaaacaaagacaaacaaagacaaacaaacaaacaaacaaacaaaagaacatatttaattggtttccttacagtttcagaggtttagctagttatcattgcagtgagcacgagggcagacattgtgctggagcagtagctgaaagccacatcctaatccacaggcagctagagagggtagaggggagagactgggtctgacaagatcttttgaaaccctcacccctagtgatactcttcctctaacaaagccacacctcctaatctttctaatcctatccctagagactaaacattcaactatatgctcctataggagacattcttattcaattatccacaaagtatacctttacattttccatattatcagtgaattaacataccttttttggttgtctaatgagttagatgttcagctaaatttcaaacaatcaatcaaaaaatcctattttgccattttaggtataaaataaattacatagagttacatacataaatacaattcttcaaaagtcttgtttagaaataattgaaagattatttctccattgtctacaatactatgtatgtcttttataattaagaaaatacaatgtctataaaataagaatcaagagtaactcctttcaaattgctcaggagcaaaattgattctgcagattagaaggtattttctaagacaatagaaatttctatgtctcatagcactcagaaagagaacaagaaaaagtcttaaagtagctttcactcagaagaagagtttttctgaagtatgttgtatttcatcagcagcagctttctctaaggtcagcagagccaaaaaggagctgatgggtgatttgataaaactcgttattggacccgttgggttccaaacacattcccaggcctctgtgggatctcattatttctctcagcgatcctgggaagtaggtggcatttccccattttatgcatgaagaaatcaagtattaaagaggttatgaattgtgctttaggtcatacaactgctaaatgctaaagccaaaatttgaatctcaatctgaagccaaatgccaggctcctttctcaagctccttatggagctctgaccagaatacaagcctcagattcccagttctgtattttctctgcactgtgccgactccctgcagtgctgagataatgctcttagaaacatcgttaatggttgttttgacacctcgttacacagaattttctcccaactaaacatttcttggcaaggcagtggttcactggagtgctttgttaatttaaagagcaatatgagggaagtccttttcatgggaggcagccagtgtgggagaacaagaggcattggtggggctttctgctgggtatcccctcatctgattctcaatggcaccacacacggtgaatccaacagctgagtttgactggtccacttatcaaagtactgatcttctcgactttcttcctcccttttcctccatgaggaagtacattgtgcttgtcacgggtgccctgggctaccttcaattcacaggacagggtagaagagattcatcattttcttttgtcagtgcttcctgcttgttgtttgacctttctttgcataccacttgataagatctggcatatattgcttacaggtcctgtaactcttagtattggaaaagccatttgatatatttaacagtatgaaaacctcctgtgatgattactttgtcaactctcataagctagtcacctgggaagagggaccctctgagaaaatgcctccatcagaatggcctattggccagtcttcaggacattttcttgttcaatgattgacatttaggggaacagttcactttgcttatcttctcctgtgcaagtggtcctggattgtttttttgtttgtttgtttgtttgttttgtttgtttgtttttttatgcaaactgagaaaacaacaaggaacaagcctgcaaattgtgttcctccaacgcttctgctttagttcttgcccccaggctcctgccttgagttccttccctggcttgctttagtatcagaatgtcacctgaaggctataagatgaaacaaccaccttactccccaagttgtttttgatcatatcattttacccagcaacagaaagcaagctagaaacacttccactttaatctcaatactttaattttatgtacagttcaagtttgtcttttcccatgactttggtcttccctacctttttgtctaggcctcttagaagagggtagtgacactggatctttgaaagggtcaaagtctttctccttacttcatcttgtcttttcttagtatccagcactgacctggcctgaggcccactgcctggattgtgccaaatggcccttctcttacaggccctgatattggatattgggactcatatggcaactcttaaagagttccaggttcttatgttccagagctgcagggtagattaaggggtccacaaacacccaagtaaaagaatagcaaatatttagggaacatccaaacactgaaggtaaagagccaccttggtcttctgcccttgcaggagcaggatgctgcaatgcaggttaatggtcaggtcgaagtctgtcatcccaagagagagtgcacgaaacttcctcttcctttgtaagggatcatgtgggcacaccgaaagccatgccccaagactctgaaactgttggaggaaatgaattcccactacacaatacaaagaattagacatagacagatagatagcaagtgaaacaaaaagaatgtacttccaagaggaagaagcaggccagactagggagtcatcctcatctacgagtcaaagattttatgttgctgcaatatagacatttgcctgccagtgtctgcttcaagctcaccaaaggttgctgatggtgatgcatttggaagctgaacttctgctcctcttgaattttgcaaaaatgtgaggtcactagttactagaagttgaaaatagcaccaatatttagccaagagttttcagaatttgaaagaggctcagagatattttaagatcaaatggagtgaggtagggttttcagtaatgcttaataataaataggactaaagtaataaaaccagcatttccaaacaaatacatataatggtgttaaatcctatcagtcataatctcactggaaataatttcttagaatctttaaaaacagaatattgatgctaaatctgacttcctgaaaatctctttttctcttgaaatttgttgatggtgctttatgcagtatcgaagaagttgagcgacggaaaagggtgcactctgcaggaaaaagagtttaccagaatgccaagtggtggatgttcaagagatatcactgccagaatgcaaatcaatggtttaaacaagcacatccttaatggtcaaggatgaaaaagaaaacaaaaaagcaaacaagcaaaaaaaaaaaaaaaaaaaaaaaaaaaaaaaaaaaaacaagcagggtatgaattcttcctcctgaaagaaatgaaaacctctttcatagagttggaggatgctaaagcaaaaacaaaaccaaaaacaaatcaaaaaccttgggattctatgacttcaactttcatgttatagatgaggaaactgagttagagagatacttccttaattttacaaagaaaggagctcttagcacacagtcaggatgcagttttctgtcatagtgacaattcacagaagatggttactgctgtgacctaaacacatttgtccacagtgcagtgttcagattatcctttgtaggaccatctatgtgccaatgacaaagcacacatttttctactttcatcatttttcttcctgtgtatggcatgtttcctatcaaatattaacctcgtaagaaatgtcagtgtttcactattaaaaaaatagccctattagtaatggaaagtctattctggaaatgatagaaggaagtttgaaataaaattatcagccaagattcatattctgcattgtggaagcacacgtggacttgtcaatcaagagcttccccttacagagtgaaacccaggcagccatgactagtgcaccagctccataacactgtcagcactctctgtgtccttacctatcagtcctagagtcgctctcacttggctgtcatccaagagttgtgaagtcacttaggtcctctgtcatgtctgcattctaggcaggcagaagaaagcaacagagagcaaataatgagacagtttttgtgcaaagtcataccctgaaattctcctctccccaggcacacatacacacacacttttctgatttggggtcctcattggccagactgtctcacgagcagtcctatcaggcaaactgaggtttgaacacgttacatacacatctcccctctgatactaggattcaactgttacaaacaaggaaacaaggaacatttaataaggatgattggccgcatttaccaaaaaaaaaaaaaaaaaaataagagttttcttttaaataaggctgagtgatataaaataacagctatcagccacatatggctgctaaaagtgtccaagaggaactgaaggtttctataaattcaaaatgttcctcaatattgaagaattaatatgaaaaataatgtaagctatctgattaataattttatatcatttacatattgagataatatttgtatattgggttaaatatgttaatgagattaatgacatctggttttaattgtcttattgtagcttagaatagttgttacatatataccatattcatggcttacattgcaaagtttggagaaaacttctttgacttagtatactctatatttatttgcaaattaccttgaactagtgagtaattaatcaatcataatttaactatagagaatttctgaggaaattggctccttatattctggctggcaattttttttctaagaaaattgactgaagtaaccaaagagaagcagttttaaaagaaaaaaacatgtcacacagcagtggggagtgtaaccacatggcagacactgaaaggatttcagctggtcatagtgagaacacacgcagactgaggtgaggactaagctagaatggctatttccaagaaagtaaggcagtgctgagaaaaggaaacaatacacggtttccaaaacgctaagattccacaggaaggcaaaggcagagtgcaaagtaaaaatacttttcaagcagggaaaaatggtaaaaggcttccagatatgaacatgtctgtggatgtatgacttattggtgctgaccagatgtactacttccaattgctcagatctgcatcttcatatgtggacatcagcctgcacccttctccaagttattccacactgtgtaaaacagtgacttgagtgatattccttcctctgcgtgactccatcagaaagcagaatttgtctcagctctgaatgcaaatgcagaggatggaggactctgcatctcactgttgacactgccatcgttccaacatcatccatgaggtataggctgataactaattcatttctaaaagtaaaagttccttgtgttagttagggttctctaaaggaacagaactggtaggattatgcatatatttaaatataaatatgtatctaaagtatcttttttagatttgtctatacatgtggtccgagtagcctaataatggctgcctcatactggagaagctgagaacctaccagtgactcgattcacaagggtggatgtctctgtactcccaatatggcactgaagaactggagaattctggaaggctacttgtcttctgtctaccttggaaacctgaagaatttagttctaatatgggtggaaatatgcttcagcaacaggatagatgaacttgtcagtgaaagcaagagaaagcaggaaaaaggcaaagtttctgtctttaatgcccccgctccctgataccatatgaagatactgcccatacttagggtaggtgtccttacttcaactaatctgatcaaaattggccctcaacggagtgaccggtgacttgttttatttgattccagatacagtcagattgacaaccaaaattagccatcacactacctataaatacacaaagagtgactgaagcaactacatacacaagcatataaaaacaataaatcaggagtcaaaacaccaaactcactagattgaagaaggatacagcatcctcagatgaacctcagaaggagtgacaatagccccctccaacttgtcatctgacaagttatcagaacttagctcagctcagtccccactactgggtacctacttgaattgccatcctcctgttcattcctgtatctatccatctagacctggtcctgtgcctcatctcaagagctcagctcaaccctgattccaagctcatcactgtggtcctgcaacccagcctctagcagctctccagctgtgtttgttaatagcttctgtgactctctctgcatctgtatcacgtctctgcctttgtgtctaataaggcctctttcaaccccttcaattctgctgcagatacattaatccctttgtagccactcagtaacctacacacacacacacacacacacacacacacacacacacacacacacacacacaccaagagaggggagagagagagatctgttgattacataatgtggtgatctaagagttaatattagttattaagactgaaaaagaaaagaaactgtgttttctgatagccatctatcaaagaaatagggactacttggcaaattacagtcaaacaaaaactcaatgttgttcataaatgcattattactcaatcaaatctaaaactggagatacgcaaatgtgtccatctatgtttctggtcacaatagtacctggatgctttctcctacctattgaatgtcactgtctacatctggcaatgacatatatagaaacaccagagaagaatacccctcccaaaggaactaactgattactaacaaaagctgatgactgaatatgctgcctctgtaacctttcgttgtccctgagaatatattttaaaccagatcctatgtttcccttggaggagttcattttagtaaatattaataggatactagtagccaacctgcactgattcccttcatttcccttcccactttgatgtctcccattaataagaagccaagtgattgctggtgggtggagagtttgatggacaatgatttttaggataccaggcttctttggaggacaaagtgttttaaaactagatattgataattattgaatgatttgtgaacatgctaaaagatagtgggccacacatttgaaatgtgtaaggtattaatgtacaaactctctctattaggctaaaggggaatgggaggggtgtcactacactaggttatcattgccacagaaagaattacagtcaggaaagtatttgacagacatgaaatgaaagtggagtaaacattattaaccctgacaacaagaaaatattgaaatataaataataaggaacaatataagtaagtgctaggatgtaactctttgttttatcatatttttatgactaaaagtaattttatccagacagaattgtaaaaaaaaaaaatcatgttgtctccatccttgctgtttttcatgatctattttgttttgctttgttttgctttttaatcttatagagatgtttgggagaagtaatatgtgcagtactgatacttttgagaatttatctatcattttaactgtgtaattttcttttgctattttctagaagtataaatttatcaagtctgaaaatggggttgtctttaaacatctcccaaccctaagatctagccatgttcctgccaaagcaaggcacagctctcatctcaaagcaaataagatgtactttattccagagccaaatataagtggccatggccaaagattgtgaattacaattacctggaataccatattaacattgtaatagtttcatgcagtttttgtaggagcagaacaaagactgtcataagtcaaagtgtttttaaaatctattgatgggagcatcaggtaggccagttacaacatagtaaggaaatctgttatctgcctctcttagcctttggggtggtggaagccaaatagtcacaaaggtcagacacaaagtttttaataaatagcagtgtaggagacaacacaactcaagataatatggttgcaggcctgctacactccataaccacaggaatttgaatcaattaactggccttgtaaaatcttatttttaagattaaaaaaatagttatctgcctttgggtatgtgcaagtaagtgtggatgcctgctgaggacagagatgtctctggagctggagttacaggaggttgtgggcatgtgctgttgggagctaattcaggtcttcaggaaaagcagcaaatgctcctaagtgctaaaccatatctccagtccccagtcttagaaaataattaacacagatgtggctttttttgctgagaatttcagttcacactcaatatgggaaaaagaaaaaaaatatgaagaacacagtcatagtggattttttttcatagcagtgagaatgagtcacaaaatatcaattcaacaggttactgtaaagaaaagtctactgcggagtctaacaacttccatttctgtttaattttagagcagagatccccaaattccctttcccttaagcttaattgggaactttacccttttatctcatttcatctttttctcttcccactctcacctctctccctcctccctcctcccctgttctgcttccctgttatgagcatgatatgttagaaacatagagaacatgttgaccatgcttgtgtctttccacaatgacagatttactgaataataataaattgacaaaatagttgttttcgatggcagcagtttgccatatactttctcctttcttggtagtcctggctgaggcaagcatgggctatttactcctattaagttctgttattaaccccccagatcacacattatgcttcacagagaggttttgggaatcccagggagcagatgaactgatagaaatgtagtaggatgtcctggtgtcaaaccaaatcaagaatggatctgtaagtgcagctgaagaaggagccgtggctgctgctggattcccttcggggtcagagttgagctgcaggagctgggtgaagggaaggatagtacttgattcagatgaacaaataagttgatgtgtggatgaatgtatggctggtccagatggtaaaccagaagaaagacagcaagtcaaacaggctgcatcagcagcagtagtgagctgaactgagctggagccctttgagtagtcaggagttccttccctgtccaaccaacccttgatgcacatacccaataataggatgttaggtctataagtcatggcagtgttaggtgtcctcttctttgtagggcccagatgaggaaattacatcattttctcagtcctgaatgtccagtcagctcttcctttcctgatacaatttataatacactatatgaccctgcagtcccaattcacgctggtaaatatataggatggtactttttctacaattggaaataagtcacctatcattctgtgctgtgtgggtgctactgagcagaaggtgctgttcacataataacccaaatccagagtcacctccatcctcagaatggagaaaagggcccctcataaaatgaagtcacccaggacaaaacaaagcctgaaaaccctggttttacacataggaaataagtaaggacaggcacagctggatctcaacattctttccttctccatgtgcatatatgccagatgagctggtttcctgggcccattttagaggtaaagttcttctaggtcctgtgagaaaacaagcctttctaagctcagagtacaaaatcattttgtccttacctgtggctgtatttgccgctgatttttccttcagaattcccctttccaagaggggaaattgattacaaattaggtcattacacatggagtatgaaaaatacaccaaaatctatttgattgaccttgtcctgaagtgatttccttggggactgacatgaccattggccatcatggaacagagattgctgagatgcctatggaacatctcagcctccattcatggcaaggcaataagaacaaggcagtgaaagttaagcctatggtttctaatgacagtaacaaggctggtaacatttgcttatagaagagatcgggaaagggtcatcagaccctcacctaagactccagccatcattttcttctgcctcctggcttcatgttgtcttggaaactgctggagtatgtaagacatgaaagctaactgagggtgggatttaactgatacagcatttggatgtagtagatgctttaagtcacctgtttttggaagtaggcccatactaattgtcatgtaaataagccggagggtgccctgcctaggtgaacaggcatttcttcacatctcccctaaggcatcagacaacaatgcatattgctcggtgaaaagacacatggtgacaaccattacaggacagaatgttcagtagctacgaggaagttagtaggcttgaaggtcatccaggaggataaactctttccttatacctttatctcctgtgtctctgggaacacaccaactttacaagtgaaaacaactcataaaagaaagaaggaagcaccgtaactctttaaaatttgaagtaccacaaggaaaggaaagaaagtaacaggaccttgttgaggcccattaaggaaaagctgttttctcctgttacagcatatctaattatcatgtttctatttaatcttttaaaaatctgttgctgcatgcttttcagtctaagagaaaggatttgagtggtatctctgaccctgggtggagaactgttgagattatcagattattaccccacaggaggcattctgggaaaacaaaccaaaaaagccactattatacactcccttgagagtttacccaagtgggtctgtcaatctcccatgtaagaaaatgccccaggaaacctgtcccaagaaattttagaaaatagtgtctagaagctatagactggcccaacggtgtacccacatgtacattcttgccctctaacagtgttttcctgaaacactggcatagtctactcttacaaggtgagaatgatttcctgtgcaatggctccattgaccagtgtccattcttaccctaagagtgtttccctatacatcgtgaatggtttccagtgtgatggttcctttgaccattgcccactctatgtctgaaaattgcctcctgtcacttacgataaacttcatctttcataatacatcttgtgacctttctcttttaaaactacaaacatttactgatcacatctacttgttaagcacactcctttttttgtctttcttgagattttatttattttttataatttatttattttttaagtttcattttacattccaacctcagttctccctcccacccctcctctaggccctttcacctccccgccatccactcctcctcactggtaaaggttcccatgaggagtcaacaaagtctggcacatgaagttagggcaggatcaagcccctctcccactgttaagcacattcttaatacaatgtgacatgcaagggtggagagagcacaattcctggccttctacaattcccagaagggtgaagcatgcatggtgttcacaaataatcacaggacaaaaacaaatgattacaaaagacaactaagaggaatgcattgacttattttgtgctgagcgttatgataaacaatacacaagagacatctaatttttatttccagtttaccaaactgaaagccagtccaaataaatgctgaagtaacatatgaatgtgtagtggggctgggaactaagcccaaagaaacagacctactttaagaaagatgataaggaaagaatagaatagaatagaatagaatagaatagaatagaatagaaggggcctagaagaagtcttttaattcagtcattgtgtaatctggggaacttgatagtaaggaagagccatgaggggatgcattgctaatggaagtaagaggaaaatgagaagcaggaaggaaggagacatgcagcctgctgatagtcatagccagcacccagtgagtccagacttcacataggagcataaagggggggaagtgtgtctctagcttctgcgctctcacccaagtccatcctgacatcttgtttttggaacaattgtagtaaataggaatactcttggaaacactcagtggtacttaaccttcctgatactgtgaccctttaataagtttctcataaaattatttcagtgccacttcatagctgtaattttgccactgttacaaatcatattgtaaatatctgctgtgcaggatatctgatatgtgaccccaatgggtcataacacacaggttaagaactgctgttctaggtccttctttcacaactaacaaaaaaatggagaaatccagtttattggtagaaaagatgagaaggagaaaataccttctcagttagaaaaaggatttggtatatatttttaaatcttaaatatattcattgcattttctctgaatgtctcaaaatagaagccccaacaccagatagatatatttatttctaggtgagcataggggacttaatagtgtctttcaaaaaaattatttagccctttagcatatatgaatgagaccttatttgcaaataaatattttcgtacataattaattcatatggaatcatatgtattaaaatgagctgagatccaaaatttgtacccttgtaagaaggccatgaaaaacaaagtcatttccagatatgtgaagacaaaggcaagaactagaaagatgtatctgcaaacctaggaacataaaggccttgaataactgtggagaactggaaggaggcaaggaagaattctgttgttttaagcctcccaactgtgttcttggctgctccagcaagctcacacaatgggcaactgggaatcatagtcagtgacataataaacttttttgtaatatggcatttcccccaaattagtagaagtgataaatagtacaaaagtcatatgaagacagggcgatacagcattccagagagctgctgggtggataaagcacaataatgtagattcaacaaataaagttttcttaacttctgtgtgctagatgtcatcacttgttgtgcagtagaaattttaaagtttgccaaaagcaagaaaagttcgagtcacttttttcactctgcccatctgtctattcatacatctatctactccccatccatctactcacccatctctccatccttcccgccaactacctaattcacagttaaatcggagtacatcaggactgttaactgtagaagtatccacgaaataggagtcaatagaatcagtggttgggaaaaagaatatcttaaagtcagacttcaaccaactggaaattaagcacatttgttgcatgtgagaatgtgttgagaaagttcatatgctgttatagctgatggaatcatatctatggggaaagagcttgaggagaggaaaatcaacaacccagcattctgccatgagaccccatgatgaagagacgagctcccacgggcccaatgaaactccaaaactctcagaccagagttctacttcttaccaactttctttcacttcatctgccagtccctcttctcttccagctacaaattcagtcaggcagtgtcagtacatgcggtgtgctgcagtgaaaatgcaaacacattttctataatgaacatatgggtagctccagttgaaaagagttccgatcctatcccaagcatgtcattggctatgactgcagaaaagcaggcagcagacggaatcaggaagcatggaagcaggaaggaaaggatgtgtgcctgactgctgctttagatcccgtgtgccaccatggcatgccacagcctctttcacactgccagctggtgtggcgtgttgccttccatgtgtttaatgcatagcgatcattctaccacccatgttcttatataactgggaaagattctcattcaaattttatgtgcattgaaattttaatgtagttatgggtattttaaattctttgattatagggttaggtattctaaagttaaaatacacatgcaaacaatctccacacatccatacctaggcctaaccattattaatgcttcccatttttcatacgtatttattacataagtacataaatttaaatatgtgcatatatatacaatatatataattgtgcacttcacatttatgggagaaattattcttttacatatactgtattagccatggtatctatctttgcgcatagttttattttgccttgctatcagtttcaggatggtgatagaattcaaaataataagttaaaactaaaattgtttttcttcctcaaatcaattacctcttgaagtgtcaactccatggtgtgttcttcaagatccatattttttctctgatatggaagaagatatgtattgtacagatgtttcactgatgagcacagccatgaccaatgctgagactcaaagacagagcccttctttggaatgcacagagataatcacaggctgtgaaagctactggtacatcagaaaactgcagctgtctacttagccaaggctatttagcatccaggtagaattgcatcagctggtatgtaataatttcttccccagcaatgaggtttcccacagtgcaatgggaggctttcaatagatgcccaagagcacatagccatttgtttctctcaaatttgaagaagatttctccatccaggttaaataagatcagtggtttgttttagtacaaaaccaaggagaatgagaacgtagaaaggactgactggaattgcagtaagtactgaacaaagtagaaagtagactaagatttccatacaagccacagtgtatgtgtggggatcataggacaactggcagcagggagctctctctttctctaccatgtagattccatggaataaactagattgccaggcttggtggtaagcacctttaccagttgaaccattaccctcccaagctactgttgttgctgctgctgtttctccctcttttccttatccctctcatcctccctatccctttcccctccctcttcctcttctcttgactcctccgacaatgagaagaatcgaaaattttctttgggaataaaatcacacaaaagagaaagaaatagaccacacaagataaataaaagctcctttccagaaaaacaaatattccaggcaacaaaaagaaaattatgtacagcacatgtacttctcacaagcataaaacaaaacacagaaggtataagaccaaaacaggaaaaagatcaagcatgagttcctgtgacaacagaataagatgagaaggtgtacgtcagtgggtggaagcctccattcatcagagcagacaagtcttttctagaactcagtcaaatgctaaatctatagaactaatttgaagagatgacactttatggagaattcaggtaagacagattggcctgaagtataacattattcatcagtaagaagcctaaatgtaagttgcctatgtttcctaaatatctttgacaatcactattaattgaaggaaaattccaatgctattgagacgataaactattttcagatcacctgagaggtatggaaatgcaaaagccacatacttcaagaaatgaaaagtaatgagtgaaggctagctctagcacatagataaatacattacagagccacaagtttgaaacagcatcattgaagaggtaagtggatatggatgtgctgaaatctcgggtaggaaaggctggtcccccacccccatttaaatagctagtagaagatgaaagtatatccccagagtgtcttcatctctttttacagaagaagagatcatcttttcagtgtcagtttatgcttgccaatctcttcatccccaaaatagtgtgctaaagccacttgtcagcaatatttcagtgtatgtcagcaaagctgtcttttctcagctacagctgtaacaaatcaccacaatcaataagtacagcttcaaacaacagaaaataatctcacagagttctagagggcagagtattccttgttttccagggttccagtagggtttgttctgtctggaggctccccaagaatctgctccctgtctcttccagttcttgggggctaccttcactctgactcatggtcccaagttatattatcctgttggccctgcttccattactatatcagccctctataactcatcctcctgatgcctctgctgagaaccctgtgtttatgttggacccatctgaataagacaggctaatcttcccattttaagattccctaatttaatcataaggtcaaaatcccttttaccatgcaaagtagcatatccatgggttctaaggactaagatgtggggagactttcagaggagccaagtctctcagttcatgaattctcttattattctaattatgtaattataaaaaatccactaaaggacaaattcagttgcatcctcatatatacgtttatttgtgacaataaagcaataaagaaaattttcctagatgctgcttaatcttgtatgtatcattagcttcagttcaattctgcttttccaagaaattgataggcaatgacaaatacttggctcattaacaaatgaaaggtatgaaatatttccatttgttttgtatttatatagccattacatacttatatattgaatgcctagtaacatcaaaattgttattagaatcttaataattgtggtagtaattacagtagcaatagctgtcatttatcaaacacattctatgggtcattgtgctaagccacatgacttatttgtttttaatcatcttataatgaggatattatcttccataatatacagctgaggaatcgaggactggaagatcttacagagtggcaggctggctggtgccaggaacaatatttgaccctaaggattccaacttcatatcctttacacgggcaagatactggacaacaaggaggagtagggtaatctccttcatgtgtttgtcttccaaagaagaaacaaagagatttaatggaattgggaaacattgtcacattgaagcatcaaagaggtggtagtaaatggcctgggggggggtatgcaccggcaaacttatgcaaacctttaaagctggctaattagtccaaatttaatcagagcttcggcagtcagcctttttcaaagttttaagccaaagcatggcatgatcaagtttgcatataagaaagtgtcacttagatggtgacaataccagaaacagggagattaaacagagcactgctgtgggagtctagacatcataacaggattataaatgtagcattgtatactgaaatatatatgtaaatattgtgaagagggcaatatccatgtgggtttttaaatatgaaacacagcttcaaaaatggatttaaaaacaattcagaaacctctctcccacttcacactagcccacctcttcatacattttgctctgctaggaggggcacgccagtagaaaagggtacagagacaacagcttttgtacaggccagaatacatcaggcttaacataagttacagtgccttgagtgtctctagagagtaaaccttgagataaaaacacataggagatagtttgtgtaggaatgttttcaaggcatagtcataaggggcaggagcagagaaaagaagggaaacaaacacaatagctgttttctatctggtggaaacttccaaggcacccaaacagatacaaattaacgaatccatgaagatgaagtagggaacacatgaatctttacgcccaactttccatcacctagtgttccatgaatgagtatccagcaggttctcactagcgtcccagaagctctgagtcatgatgtggaaatccacaggtccaaagtggcacatccgcaagctgcatgtgggtggagctggtgaaagctggcatataacagttgccaaagtcatggctgaacacagatgtggagctatggtttgtaacaatactctgctgtttggtactgtttgtctcctccttagaatataaaattgagttttattttcttgcatcccttcagttttagacttcttcctgccttgagcagtgttgtttggtggtagatgactatggagtccagagtctctgatgtgtgtatggttgcctctttaagaagtagctaacttgttcccaaaaacttacctactatgatgcttggggatgtggtgtttcttcttcccactacagaccagatggaggaccagtacaatggctgtaaggataaaccccaacaggcatgatacaaactgattcttgcaaaaaataaaatctgctcacctagatcttcagaagtcgcattagaatgtggtacttcataacaaatctcaagataatttacattttcaaactagaatctgactcaaaattgattctgtttactgtcttctttccttccaacaccaccagtctaatggtgtcccatatgttgtcaagaggaaattagagctcaagaaagtgacatgtatgagccatcttaagtcactgagctatgttgtgacagaaacactttgagggccagtctgtgtggtgtagttcctttcccagaattactcaatggaaagtgggttactggcaatgccaaagcagcaagttcaagtttgtgtacagaggtcatgtattcctccctcctctacaaaactgtctaaaacacacaaagtagcctgcagatgccttggtggttagaagtgtgccttttatccggtaccggacatcttgaaggatctatctcaaaaatgttctctgtaaaatgaatttctaaggctgtggtattagtcatcccaaaggaggctaataatcttccccagatacatttgtctctgccctcctggctttgtgtgcctgtctttgtttatagtcaatcaatattgttattaaggtgcctctggcctacttgtacccaggttgggagcttgtctgtgggacagcctgacttaccacagagacaccaaacaccctttcaaaacctattactgggtcaagcctcaactctcctgctttaaaaatcatttcttcaaggtttgctttgaagttttctttctccccatgtcaggaggaaagctgtgaatttcttattttcaacaggtccttctttgagagatggtgacccagtaagagatttcccagactgtaaaaatcttcctgtcagaggtttaaacttcctctattaagatgtctgggaaaatggcttaaaacaaaacaaaaatactctcagtttttgttttttttttaattatcactacttccatgtctgacattagtctttccatccagtccagcaaaatggatatactaatcactgaaagggctcgctcaccagttaagagtaggtactgttcttacagaagactagagtacagttcccacatcaggtacctcacaaacatctgtaattctagctccagaggatgcaaggcctctgtcttccatgggcactgctgctcagatgcccctatctacacacacacatacatacacacacacacacacacacacacacacacacacacacacacactttaaaaaaaatgtgtccttaaaaataattttatctttatgtgtctcttgctcaaggtaacctatattcattaggttctgagatagacagtttaccagaaataaattggggtcatcatttgaaaatagtgttaagagtgtgtaactctggacttcaaatttatgaattattttacccaatgtatattgtacatcctcttctgtgtctgtgaaataaacacagcatgtatatctttagaaggtattgaggggctggaccaagtttatcagtcacatggctctcactttggaccactagaagctggctgaaaggcctctgcacaaagcagaattgggaaaacagagactgttgagcagggtccagaactgcaactgtgggaactgtggaaaaatcaaagctcatcaaaaatctgcatttggagaaccaggggaattcaagtgacaccaaatgtaaaggatgagagaagagcagggagaggataaaagtggcattaaacaagttcaaagatgaataagatatggtatgagaaatgaaaaagaccagcagggccaggggtgtatgcccagcaaataccagagctgataccaaagggtgaccttgcttactcacagcatgtcctatctacctcaggccttgatgaacaaaaagatctcttttgaacttttttctaacttactccaatgaataaagtccataaatgtttgccaatgaagaaaatagcactgttatttaacatatatatatatatatatatatatatatatatatataggacccctattaagtagcactcaaaggtgagttacagacagtaactgcctttggggacaaataattgtaaggtagagcagacttgattgttggtggtaatcatatttatcagcactgaattcctaaccttcttaaagctttgtacataagagaccaatgaagatcatgactaaattcttacaagtacagaattataactaaggaagaaaatacaaacttgtattatttagtacttgaatgaaatacctgaattaaccaactcatgaagataaacagttgatttttggtaagaattctggaggcttcagtacaaaatcatgcagcagttgttttggactctagcaaggttggtagcttgtgggagggccatgtggcagaacaaactgcttctattctaatccacgatacatttccagtgagtgacagacttcccattaggccctacctcccaaaggtcccaacaactgggaacagctccactctggggtcaatgcctagggctgaaaccttgactcatggacctttggaggacattcatctaaagttcaggattgttggtagaatgccccaaaatagactttgttttctcaacacccaacaataagaacagagcatgaggctgactgctgccaagggcatttaacagggcaactcacaaaagcgaccagtagagggagctccctccaccaatgcagccagagacaccaacatgtggtatacatgacaccatactgaaatgggttgttgcagtccctggcccaccgctacaaatgcaagtcaaattctaacccttatgatcttccttaagtagcctgcacccctcacaatttcctgctttgatctttctccagaaaagattgctatatttgtcattaaagtgtcagcagcatgagctatgtcacaggtgacttgtatgtggtgcagcctttaataaaaccccaactcctctgggaaaaagaagcactgagttcattacacgcccacattcaaggaccaaaacattctgtagctttggcatctttacctctgttggattcctttttatgacatcctgatttccaggatacatgctattattattttactcaatcagttagctgatttcctctgactaaaatttatatgtgcaataaactctcttttgaatttttccaggtagatcccactcaatagactataacagaaaacgagcataatctcaaattcctgaattacataaattaaacctgatagctttgtgggatcatttttaatctgattaaaaattaattaaccttcatcttctaaattttccttcaaaaagttatagtaattttctcttatccttttaagctagcagtcatggttcaaagccaagagtgtaagtagacttcagtggccatgccctcacaataaaagaaataggcgaagccttatgccatccttaccaaaacacaaagaacccagaataggatggaaaaagtgtgtgtttaacagttatgagcactttaggacagccagttgcataaagaagaaatcaaggaaatcccccaaactttagggaaatagaattaactataaacccacggtgaatttagaaaaagtgtaatgtgttctcagaggaatatgagaggactttttaggagacaggacccgactttatggaaagaaatctcaagctggagagatagttccacagttaaaagcacttgctgctattgcaggagccaggtttggttctcagtgcccacataccagcttacaaccactggtaactccaggtccatgaagttctgatattctcctctgtccttcttgggtaccaggtgcacatgtggtgcacgtacacacacacacaggaaaacacagatctgcatagaataaaatagatatcaaaaagaagaaaagtgtcactggggagcacagaggcactgaaatgaaccccttgataagactgcaaaataaaactgagagttgatgcattaagtaaaatggcttaatactgatgcaaatttgtgcaagaatcaaaataataaaagactatcaagctgtgctgcaagaacatgattactccgagagttatctagtaactctagaggaatatgaactctatgcatcaagcaacacaggctgaggaggttgtgacagtgagaagggaggcgacaatgtacaggttagtaggaaatgtctaccgagaaaggagaagagaagcagacttatagttcatatttggacagtttccactgtcaatatgaatgggttaaattcgcctatgaaaagatgacggtattctgactgagtggattagcaagtaagtgaaaggattaggcagtctgaagtttacaaagccttgcaacccaaacaaaattgagacaggaaagaaaggacacaataaaatgaaagaagaaccttcagctgctgcctgacctcaaagggtactggtgggttttcgagtctatacataccatgagtctgaccaacactggaaacagaagcagggtctttgttttccagtcattaaaatatcacagacctttggttattttcttatactgaaaaataagaagaaaaaaactaaaataattatttacattttttaatgcctagtataagctgtgttcaggtagcagaattagagataaataagatactccaaacaattaattttgtttacataattagcattgcatattttatattatgatgaactaaacactgagtaaaaattctgtgtgttttgacgtgtttctgtatgatttcactgtgatgctgtattcgattcaaccaaatttatcaaataggaaaatatgtgagatatgaacgtagacaccagaaagtctacattacagaaatccaaagcacagagcctccaagagacaatttgatgaaggaaagagaaataaatgtagcttcttcctattatttatttgtagagcatgctggttatgaaacaactgtgtgtcaaaagatatgcagtgtgaagtggcaatgtggggaacgatcttgcggattggagctccgtggggcacagatgagaagaaacaattgagctgggtagatgccttaacaacagtggttctcaacctatgggttgcgacctttgtggcacatctccatctccaaaactacttatattactactcataacagtagaaaaattacggttatgaagtggcaacaaaaataattctatggttgggagtcaacacaacgtgaggaactgtatggcaacattaagaaggttgaaaagcatggctttagagcaagcattcaagtagtgggaggctgaggtgaacaagccattaaaaagtatgcatgctgaatcatgatgtgtttgatatcttgttcggggtgggagaaggggagaatgcaaagataacaattttttatgcaataaagtctcatttgcttttgcattttgttggtcatgatcaacgattagaggtgtgttcctttaatattaacggaaggtgcgttatcagcagcttattcaaacctgggagtatatgccactgtcttgagtgttcagtccatctgtgactctgtgctgatgccactccttctgcttgcctctctcaatgaaatgcagcctaaccaacaaattacttcctttgtctgcagttggcgtgttcacagtggggctctgatttgaacaaacctgaagatgtcaggctgcataagctcagggaggggctgtgttcacaaaggtccctgttgtggaaaattacacaccactttcaaaatgcttcaccacatttaaaagtgtaattataccttttccttaatgactgacatgatatatgtttacaagtgttttagctggcttatgacactacacagtaccatgttgtatatttggtggcaacgtctaacattcaatggtaaaaagagctgagactgacagctaatgttgcccaagtgattggcaataaccagggcaacctgcatatttcacaatttcttacatttgtaattgtcatttttgctgtgggaacggtttcggtttgctcacttatgctaagcttgtttacaacttgccttgttttgctttggcgtttctttggggcgcaggacgggatttttgttctttgttttccagtgtttggtactgaacccaggacccatgcatgcttggcaagtactctgtgtcccagccttttttcctttcctttcttttattgttcttttgttcagtatttttgtttcattttggcatcgttttgtaatttttgagacagagtctcactaagttgcacagggcaccattaaacttctcttttgcccaggaaggtcttgccctcactgttttcctatctcagcctcccagctttgtaggattagaggtcaacctccttaggaggattttctagagtagcattgtctgatagaactcactaccatgactcgaaatgttctgtgtcgccactggtcaggactggagctacttactgagtacaaaagccttattggtcaaggagaaatagttgagtatggaggaagtatctttttattacataaaatttcacaattattcatagatcaatgcagtacttggagacttacatcgaactgtcacagacattacctgtcactctcacgttaatgttatgaagaggaagactggtatttaaaccaccttctaaaggaataactacttacatatggcaattaacttcacagccaaacacaaatccagatttggcatcactaatcctattactggcatcaaaacaatgtacagtttttttttttaataagagatagtcttcagatttatatggatgggttataactgccacatgatactctcccaggataattcaattttcataaatgatgtatcaaaattcatttatcatttttccctagttttaagagggaatcacaaggaaatcctaatattcaaacacattcacatcagtttgaagggtttcagattgctatttggagccgtaaaatattctttcttatattgagccagaaattctcatgcaaaaatatcacttactcaagctgtccttgttatacaagactccttcccccaccccaccctgttttccttaaggcttctcataaagttgctagtcttctattgaaaagaacaaaatcctggactacatcaattcaccttggcaaaaagaacagaaagtttcataatgttaacagcaacgagagcttcggcatactcgtgtgggtttcctactaaagatagcatgcttcccaaatgggagatgcaccaagttttaaatgcagaaataggaagtcctgttgtctttagtttgttaaaagcacttaatttaaaaaggttgataatttgatctcccgcataatatgctattctataatgactgaagtgagaaagtgggtgaaaatagaaattggaaatgactgggatgacctagaaaaattggttacctggggagtgagggcggctcagggagtgtgtgaagaattcatcttctacagacaagtaagcctgagtagacaggggcagtcacagttaggagaggaaagaattttaacaacacagataacaacaaggaatttaatgtagacagtaacacaaaagttaagtaaaaggaaaaataaagaataaatccaggggctgggtgcatgtctttaatcccagcacttgggagaaggatctttctgagttagcctggtctgcaaagtgagttccaggacaaccaaccaggactgttatacagagaaaccctgtctggaacagaaataaaaacaaaaaatgaaaaacccagatccaggcctggtgaagtagctctgctgtaaagcgtttgctgtacaagccctgaatttgcataccagcatccacatagaaaggaggacttagtggtgcacactcgtgatcccagtgcagggtacgtagagactaggagatccatgggacttaatcccagtcagtcaggctgaatcattgagctccacattcagttagagctcctcccaacccccccaaacaaaacatgaggtaaagtgtgactaaggaagatacctgtcattgacctctgtcttcctatgtgctcacacaattcctgtgcttatgtacacacatgaacacacatacaagagcagatacaacaaggtaacatagagtacgcaaggcagagtaggacttaagtaccctatttgtacaaaagtgtactcaaagtagaccatttccttcaaactttgatagaaataccattaatgcactaagcaggctgcctgcatttatttgggtgagagaaaaaagaattgcagagcagctttctgcccattgtcaaaattaaaggcaatcaacactacatcctaaagtgcataacctaaatggttattatgtgcatagattttgaattttaataagaaatgtaatacctctgcattatcaatcacttggcctcttgaacaaaaaggaaaatattcagatcaaaacactcttaagaaactgcagagatgcacagcagcaaacaggtgtttgtttctcagctttatttcctcataataaatttcttggtgaatggagagaggactccatggttaagagcatgcactgctcttgcccaagccctgagttcatacacacgtgtggctcacagccacttgcaattctaactccaggatctggcaccgctggccttcacagccacactcattcatgtgtacatgcctacacacacatgaacataatcaaaaataaataaataaataaataaataaataaataaataaataaataaatgataagttgtttggcactttttgaaacctcataaaatggactttataagtggtaattttctaaaaacttatgtatatgtttttcaaagtcatggaatagtattttattaaaaatttgaacttctctattgctttcatttttagtataaaatctaggaataaaaacttctcacccttggcatactgttaagttaaaatttcaaagtgatgtatgtgatacactacttaaaatctggattctggaaactcagtgatttcaaagaaagggcatcccaacctacctgaattctcattgtcagaagttaggagtcagaaggcaaagaaatcttgtacaaatactttttaggaacttggactttcactgggaatacaacttcatatcttaagttttctttttcaattatgtagtaaagtggcagttacaataaggataggtttttattaacaatagatgtcagaaaataatgaggcaatgtgttcaaagcaaagtattgaagaaaaataaacagtgaagtcaaaattaaatatgcagctaaactgatattcaagaattaagttagtataatgacctattaaattagatttcctgcagaccttcaacagtcttgaaacaatggttatgcactgtaaggaatatctaggagaaaagaaacagcatgtaaaatgcaacaataagcacaaacttaaggaaatgctaacaaaattaattagtgtttactaaaacaataattttatgcatttaaagataattctagataataggaaaactacaatttaaaaaccaagtgttataggtaaatataacagttctcaaacacttctttaaaaacataattaatatctcaaataggaatgtctttagggaattaaaatgaaagaaacagaaaggaaaacatgagagaaggcaactgtttctgaagcaatggacagggaggggtttgctttctcaagctgtaatgatgtgaaggacaggatgggaaatgacaatctcatcagaagagatggaaaacacactagcctttggatgattaggttcttaggataaaggaagaaagctttttatctgttatgccatggtcccatgtgcggagtgtggctattgtccataaaactctataatgaagggttattgtcacatggtttgagattaaaatcataagctgttctataatgtagttgaaccatagactgtaatagccatgggtcatccagaaaacaaatgtataactattctgaaagcctacattctaacatacttcatacttcataagttcttatttgatgtgaccctattaaacatgagctcactatcaatatcataaaacatctttaaaaactttaaactaaaaaattaacaaatctaagcattatattcctaagagcatcacataacaaaaactatgaggaaaatatacacgaaggagattcattctgtacaaagaggatcaaagcagtgataaatggatgcctttgattaaaaagtacagacattatttttagaaataaaggagcagacttcaatgagatgttgtaacaacagtttaaacacaactgatcaaagaatttgtggacagaactatagctactgagaaattagccagaaaacagagaaaaaaacaagagacaagatgaaaatgttatggtgtaatctttttgtacactgtgaatatctattattctgataggtttaatcagaagctgaaaagccaatagctaggcaggatttggggatcagagaggatgatgggaagaagaaaggcagagtttccagccagaaaaggaggaagcaggaaagcagcatgggcactacagagtaaaggtaataaagccatgaggcagaaagtaaattaatagatattggttaatttaagttataagagctagttaaaaacaagctaagctatcagctgagctttcataattattaagtctccatgtcatgattttggagctggctggcaggatagagaaagatttgcaaaataaaatatacctagacacaataatgtgtgtgaaggttgtgtagtgagcacccaatagacattattgatatttcttagaccaaatagaaaggaaatataaagatcaaagtgatctgagttagcacaccccagtgctgcacatctccccactacactacagttcatgtgtccctggcccagaaggcaacataaacatggagaagcccaattacagtgatatattatttatgatttataaaagcttgcctgaagattcagaaagcaaagtcagccacaagccatagaagccaggcacacaccgttaatcccagcagccagaaactaagaggtggtgatacacatctttcatcctaggatttaggattaagaggtagatggatctctccaaattcaaggccacccagggatacatgagactgaatcaattgaaaagagtaacagatcacacacctttaatcctagcactagagggttataaacgatagaagaagggtcttcagtatttagtatgagacccttcagtattcattctccatactcattgaagataggagcatttattcattccccagccacactgaggagaggcagctgtttgaggcttggtgaagagctagtgtgtggatcagcccttaaagcctgagctacagttgagagctaatggccggctactttgcttccctgatcttcaagatgaaccccaatatttgtctctgggtcttttattttcctgttacatctaacagactttaactacatgaaaatagtaatagttaactatgggtagagctgaaacatcaaacaaagcatttttcagaagcagttgaaggaaaatcgaaggctctcatatttgagcatatttaaccatccagttatatnnnnnnnnnnnnnnnnnnnnnnnnnnnnnnagagaggatgatgggaagaagaaaggcagagtttccagccagaaaaggaggaagcaggaaagcagcatgggcactacagagtaaaggtaataaagccatgaggcagaaagtaaattaatagatattggttaatttaagttataagagctagttaaaaacaagctaagctatcagctgagctttcataattattaagtctccatgtcatgattttggagctggctggcaggatagagaaagatttgcaaaataaaatatacctagacacaataatgtgtgtgaaggttgtgtagtgagcacccaatagacattattgatatttcttagaccaaatagaaaggaaatataaagatcaaagtgatctgagttagcacaccccagtgctgcacatctccccactacactacagttcatgtgtccctggcccagaaggcaacataaacatggagaagcccaattacagtgatatattatttatgatttataaaagcttgcctgaagattcagaaagcaaagtcagccacaagccatagaagccaggcacacaccgttaatcccagcagccagaaactaagaggtggtgatacacatctttcatcctaggatttaggattaagaggtagatggatctctccaaattcaaggccacccagggatacatgagactgaatcaattgaaaagagtaacagatcacacacctttaatcctagcactagagggttataaacgatagaagaagggtcttcagtatttagtatgagacccttcagtattcattctccatactcattgaagataggagcatttattcattccccagccacactgaggagaggcagctgtttgaggcttggtgaagagctagtgtgtggatcagcccttaaagcctgagctacagttgagagctaatggccggctactttgcttccctgatcttcaagatgaaccccaatatttgtctctgggtcttttattttcctgttacatctaaggaattttagatgttacatcataaggatttttagaacattgcttaactaacctaagtagacaaagactcacacaaatagaagctcttgatgtgtgaaagtagtacactgaaaattcagagacataaacttatactatcaacaactagtgctgataaagctgataatcaaaagagaaagttaacttaaaattggaattttaataccaacataagttaatgacattttcatccaaggcatcttatagaaatgacagtttaaggggaaaatgaatattttttataatactgcagcaaagaaaaagtttcaatgaagcccctaataacttgaagaaaattaaatcaaaatctgctaacagtaaaatgttaaaattcctcttgaaaatactacggcaaaacaaaaaaaaaatgttgacacaacctagatggccaacaaagaattaatatccttgtacatgaagagcttctgcaagtcaagacaaaattgaattttaaaaaatatgaaaaggaaatacactgaagtagaaaatcaaatagcaattaaagtttcatcaataagatgtgaactgttgccaccacagggtactattttaaagatattctgtgggaaaattgcaccctttgtctgtaaagttataaagaaacaagcactctcctgcaccggtggtgggatgtacaatggagaactctttggaattctttaagtaaacttgaacatgggtataaccttcagcttgtattattcttctatatatacaaatgaaaaccaaaatatgctggacaggctgtaaaagagaaatatttgaggaaggtccaggctatctactttgcaacagtatgacaaaaaataccatacccatcaagacaagaatgttagatgctacatagcgaacggaaaaatagatacactaaatgcagattttgctagaagtattacatagccatctacatccacgtcaaatactcataattatgtataaaaagtttctttttaatattttattcctaatcaaaaataactacaaagagtaccattttatgtcacacttagcatacttcaacaatgagtttcaatttgaatactggggaagaaatatctcaaattataagcatgaacattcagtaagcctgtgaatcttccagttgtaagtaaatgttcggaaagaaagacagtcacattttcagtcacaagtcagaaaatgattttttaattgtcaaagccacatatacctctattataatataatatatgcacaaattttaaatatctacctaaaaaattaaaatgaaattcatttttgaccacatatttagggattaaaattgttttcctcaacaaaaaccaacgtttctagttacttaagtatatgcaatattgcttaaagacccaatataaaagggcttttttttatcttgacttctgacttgaagatttgcaaagacattgaagatggcatgatcaaggcagcatcaatacagtgagggaggctgggaacataaataagttaactttttaactttataacaaagcagtcataatacctgtaagcctacaaatatgtagaacatttctactttatagtctttcacataccctgggttaaatcaagtagtgaaaagtcacatgtgattccaaaaagctacattagaagagaataaaagcaatgtactgatccaaaaatgacaacagcaaagaaaacttagcatccaaaaaccagaatgagatgttagtagtgagtccctcaaaacatcagtatcataatgctgtgaagagataatgctcatctattataaaacagcattgtgctgaatttgacctacatgcagcttaaaagtacatttaaaggttaacacaaattaggtaaatacttgcaagtcatgcaagagagtgtctgatgcataaataacaaacagatgctcattaaaattagaaaaccacaaaagctaaaatgagaaaagggctcagatattcagtttacatagatacagaaaggacaatagacacaaaaatcagcaactatgcacaagaaatgaaaacaacagtcactagtgcagcttcgtcagtacaaacatcaccagtaataaaactgaagatcctcagcaaacattagactcttttctgttgattctagcacagtattaattgagcgtgactttcatgttgaatacctgaaacattccctcatctgtaaaatggtctgtgcttggctctgtttgacaactttgtttacaatgtcagtctcctgcatcttgggttccgtggagatggtttccctagttctgaatatgttttaaaatagcgaatttcaaatattttcccagtaaataaatgtgctagtctttaaataactttaaatttgtatcaataaaccaaatccatatgaatgtaaaatattttgagattaatggttgttatttggactaaagtagattgaataatctacccttttgtctcatttttatatcatgtacccctttttactttagaaagagatctttgaatttaactcctttgttgagctttttccctgaccatgaccaataacaacttgtaatcaacccaccttaaaggatgacatacatccataatccatcttttggaaatgtggggtgttatttttttctggactatttactgttgtctgggaatgctggcatctttgggagattctgagataaatcaggattattgtcaagtcctagctggagtattctgtgaggctggaacatatcagctagcaggcttgaatctgttctagatgcagaactctgaagaaactgcaaaaggggtactctgagatgttggatcacctgggccatcagttttcattggtgtttggtcctcttcctctaaaaatacacaaactttaaaggtagcatacatatctgtattaatacaagtatagactatcattgtacacaagtcattcaaagatgatttttttgttttatgtttgagcaggtaaaatatacattatgtgtcttgcagtttttctaggtttatttctttatgtctgtagccaggattttcaggggtctcccttgatcaaatctgaaattcttcagtcctgaacaaatccacagtctttcattttctgtgggaacaaaagtgcaacctcttctctaaagcaacataccttttgacttccattttgaaatcaagacacatttaaaatattttagttggttcaatttagcagtttttgcaatacaatgtttctcaacagctattattcatttatcagcaatcaaaaattttaaacaacacaataacatacaggatccagacaccctgtgtatttcccatctctatatgacttattattattatttcactttttctttaaagattttactttattatttttaaactattttttctatgactatctttattctttccctgttttttttctcccaagcctatatacatttttaaaaacactgtagcccatttagaggttttttttttccatatagatctgttttactgcatagctgcagtatttcctgtctgaataagcacaatcttaaacctaccacgcagcttagctcatggcatactgatgtggctcatactggcagctcaagcactcaggcagcagctgggagacatgtttcagtaccatggctggcatgagagaaacaagccaaggaagctgcatctgtctccatttttgtgacatgtttagaaccttttattaagcttctcatgtcttgttttgttttgttttgttttgttttttgagacagggtttctctgggtagctttggagcctatcctggcccttgctctggagaccaggctggcctcaaactcacagagatcggcctgcctctgcctcccgagtgctgggattaaaggcgtgcaccaccaatgcctggcccgtttctcatgtcttatatggatgcacatgctgaacatttgggcaccatttgaaggtggatttttgtgggactttttattaattataaatgctcagctgatagtttaagcttgtcactaactagctcttacaacttaaattaactcatatttcgtatctacactctaccatgcagtggtacctcttttcagcatggaatgttcatctccttcttcctctccatctggctggtgactctgcccttctttatgacaacatcctctttttgtccacaagtgccatttatcctcatttagccctttactaaatcaatgagagcaacaaatattcatagtgtacagaaggaatgttccacagcattccacaaaacacttatgtactaggcatggtactatgtattttatatgtatgatttctcttaacctgtgtaacaaatggtgtgttgtagttaacttttatcaccttcatttttaagtctgatgaagaaaaagaatcttaatgaagttaaattaaaagtcacaatagtagtaagggttgaatttgagagtgttgctctgaaccatgatgccaagagaagaagcatttcagaattccgtggtacctgactttggtaatatcactactaaaattaatataactggtattattacattagctgagaaacaggatcagtacatcaacacacaagtaattgataaatacttcccagataacagtatagggctagacattttcttggggggaaattctatctcaaaatccaatcacctaccaagtaagtaggagtgaatatatgaaaaaaataagttttaaattatatagtatgcagaatcaatcaaatggaaatttagaggatggaaaccattggtcacagattaatgggcaaagaggactccaggaaatcacagaagtaaacttgaataataaagacatttgaacatgtctttgaacctcatggctcccctgtgtaaattgacaaattaattttttcccaagacagactgcatttaaggtaccagaaaacagaaactgaggcactcggcccacagccctactgaattcccagttatatttgaatataatgtcaaatgttgtgtgataggtttggactaagtaatactggtaaatttaagttgtgaaggaaatatctgaaagctccagagacaaaatagtcttcatgctgtctctaaaaaaatgatggaagctgtgaagttgactttccactcacccatgctggggtgggactttattcaagcatcttgagcattggcttgtggttggcctggagtattctcattcaatatcagttggaggagcaagattttttcttcttgtctattggtgtctttttttttttttttttttttttttttgagaagaaagcaaagctgtgtaatcgggtagatacatggtatatttctcgtattagtttgacaagaactagaaaaggaagagtaaaaagaccttgagtactcaagataattcttatatttatattctagtactgaaggcaaccagtcacctgtgtatgtctcatctcaattgttctctgagcgctctccaatttccaagctctccttcagtcagaattaggacatgacacttatgaagcgacattaccttgagatcttcactttgttgtcactggaagaaaagagggacttggttgttctagaaacaatcttatttggcaggtgcattgtcttccattgtcttccgtgatgagaaacttgcttgtcttaatttgcttgtttgttttttccaattacacttcaaaccattttattaatcttacaaatgccagtgaatgctaagctgatttgtgttttcattgtctctgtaactgggcttccacatattttacaaggcttttttttttcttttctcatacctatttccagcacagtattagacaacttagaaagaaaacatatattccatcaacagttcttgatgagtttgagttttcagaatagcagtgcaaggaaaggctagcacttgggctttgagaagactttctgcacaaccagaagataaagaagaagagtgttaaggaaactgtactagattctatagaagacatggcatagtggctcacctgccaatcacatgatcgcttcattagcatcccaggacaagcaacagggacaatcatcaaagctgattcatctgtactcagaatctgttgtggaaaggtttgttgaaaagcagaaatgaactgaaaggaatgaaaatttgatcaaattttaaataattgttccttgttctttttagtcattagtaggactaatcataaattgttataaaattgaaaagtaaaacttgtaaccttcacatattttactggaactaacttgtccacatgaaaacatatttttactggcacagtttatttgtacagctgtctcatttcatctgtgggatgtgggttctaagacctcctgtagatatgaaaatctgctaatgctcaagtatcttatagaaatggaactacatctgcatataatttatatatttttggctttaatcatccctggattacttatactacataatgtgcatgctatggaaattacagatatactgtgtggagttgagagagtgagagtctggaaataggggagccttttgcagggtgtcccatgctccactcatgaacattcagggacaagcaagggaaagtttacatttttggaacattctagaactttagaaatatttattatccttgattgtttgaatccacagatgcggagcttgtacatggagggcctatttaatctatttctgagtccagactaaaggttacttatttccgcttccattttctctcacaaacattgctgccttctcctctctgaaaatgaaaagtcagaaaacccattccttaacgttaatggtttttagttgctgaattattttccctgagtctccaccttctctttttgtattcttgcttctgatggctgctcatttcactgctctcatacattccatttcagacatactgagaaacatagccaaatggcactgctctccctacactggaagtgttggtggcttaccacaattaacagtggtcatataatctacatctacatatttcctacatcattttttctcaaaatatgtgattgatatttaatcaattatcatgagaaacctgaaagaattatgagtgaattacatttcaaaagaattcaaaataaacctgaggcaggttgcaatccaccatcagacttcacaaatctaaactgagatttgtgaaattaatgtttgtttgggaaaacacaaaaaaagaaaagaaagaaaacctaaatgagtgatctttaggttctcctttagtagggggtttcagttcagaatttgaaaggaaacttgtcttctcactcaggattgcttgctgctgatgctttaagtggatggtgaaggtactgagtatagttggctttgtttagaaaataccctacactgtgctatcttctagtacaatgtaggttacatcagaatctgtaggaaaactaattgtttaataaatcaattattagaaaaatttgttacaaatcacgttgactgtggtggctcacacctgtgaccctagcacccaggagacaaaatagaggaggattgatgctatgaggctactctggcctacatagtgacaccatctcaacaaacaccaaccagaaaggaaaaacagaaaagaatatggaaaaaataatcaaaaaggaagaaaactagtatattagtatgtatatatagtatactagtatatactacttatattagtagttctaaatatatatctgagtacataatgatttacagacaagttatggaggggggacataaggtattaaaacaaaactgagatgaaaaagctgtgagttcatatcatagttgcagaaagggagagaacttcccagaaccaaggtgtgagtcccaaaggaaagagctggcaggtttaactccctggtgctgatagctgctgcttgctatcaaaagtcaaagcaaactatatcaagctcatatccagccagagttttattcttagtaggagaaatgtaagaaagttatcttaagtgtcaatcataaaaacaacggcgatctgtccagctgatagaatattgtagacatgatagtactattcgcaataaaaatcatgtatgctttaatgtaagagacaacattggatgaaaagctagagatgccaaggtgtaagctaacatgaaaaacctgcttgcaaatttttaattgaatacatttgaatttttctgttaagtgataggagctactttagcatttgtatttctgttccaaagttcttattaagaagttttctcattgggcattggtggtgcacaccttaaatcccagcacttgggaggcagaggcaggcagatctctgtgagttcaaggccagcctggtctccagagtgagtgctaggacaggctccaaagctacacagagaaatcctaagtcgaaaaacaacaacaacaaaaaagtgttttctctcaggaggggctttctgctgttgtttggattattctgtgcttttttttttctttatgaaatcccacacatttctaagctcagatttgaaactatccaaaggtttgaatcaagttctcaaagagtcaatgacagatggttaaatttcaaaaaatccaaacacccatcttcagtcctgcttacagctctgaatgaaagtcacttttcacttgttattacatactctttaatattttagctttctaagtattttaattcttcatcttttcaagtgcttatcaatcctgacttccactgtgtgattttaaacacacagctgagctacacacaaatgatccatgctaccacctaccactcatcttaaacccctactctggggaaggggcacagaatgtgtcttcagatggcagggcccatctaaacacactgagaagacttcccatgtgaggtggaccactggaaacaaattcacagaggtggcaaaggacatcccagaggataagagaaatacagcagggaaatagcaggaagcagtctaatttcttcattgaatatttctactttgattttttaaaaatgtttatgtttatgatagggcaaaagtgctagcaatccagataatttaatttatcttacatttgaaattggagaactatttttcatttgttgtttttcatagactatgctttgatattattctttcgtctcctcaactatttctacatctgccccacctcgctactcactaaatgtcatgctctttctctctctctctctctcaaaaaaaatcaaaacaaattaatgtaacacaatcagatttaaaaaaaaaaaagcacacaaaaaacatagaatctggtttatgttatcctgccacacctggacatgaggcctattctggagtatggttgatatacccagtgacattcactggagaaaactaattttaccttgctagcagttttcaattagaaatagtttcttggctggggtgggactctgtgtatatcttccctgcagtgtgctgggattatgtctggtttgaccttctacaggtcttatgtgcactgtcacagcttctgtgagatcctatatgcatacgtcctgttgtgtctggatgacactatttccttggagtcatccatcatctctggtctttataatttttctttcttttttctgtctgtctgtctttcttcttccttctttccttccttcctttctttttcttccttttctgcatagatccctcagtcttgagattagggtttgattttttttgaaaatcccatttaagactgagtgctctaaattctctccctgtttgcactttttccaacataggtctctgttaattactatctactaaaacaaagaggacgcttttctaatgagaaataagcaatgctctgatctatgggtatagcagtatgatgatttagcagaaaaaatagtagtaggttttctagtgggactcatgaactatctagtctcaaggtcttggccactttagcagtactgtgtatgggtttcacctcaaggtgccagtcttaaatccaatcaaaaaaattgttggttactcctataacagttgtgccactattgcacagggcttgtagttgggtaacactgatgattacttttctcctctagtcctgtgcatagtaccttccagcacaatgaatgccagtcagtagaggtaaagcttctagttgggcaccagatcaattattccaaaatttataacttatgtaagtgatgtcttcagtgataggggacttactgtctggttatagaaggtaaccaatactcttggcaatagcctgtgatgttgaggatggaatctaaaatgtccaatgagtcctgaagatggaacattccttgtactagaggttttacttggtgtcataaaatatctaattagggcactgtctcccccattacatggtgactccaactaaatttaaactcctttcttacatgtatatatttaggaagtttctactacactaggcttccatatggctttttgaaaaacctttagtgttagttgtccctctccatattccctcccttaccttgattttccattccactccccattcattccaccaattctagtttctattttatctctttataacactatattctatttgctcttcattggaaaatcccctcctcccactctggatccttactagttacctaaactttgtggttattttaattgaaacacacatacataaagcttaaaagttaacatctacatattaaacattcaatgtttgtctttctatctctgggttacctcaggaagacttattctagctctatacatttacttgtaaatttcacaattgcatttttcttaacagctgaataatattccactgtgtatacataccatgttttcattatccattaatcagttaatgagaattattttgcatattgtttattaattcctgttattttgttatgattatatttttattaattgttttaggattatttaatctttgtgtcaattttggtgcagttaacctcttcagacctaagttttctttctagtagtttctgaagagctgtattggtgtacagaaattgctttagttttttttttttaatcataaaatatttgtctttctctatcaattgttttgctgatatagtagtcttgattggcatctgtcctagatgtctgtgtcctagatttcctggctactttgtgcctgaattttatttatttatttatttgtttatttatttatttatttagatttaacattttctttacctaaactatttcttttagcttgccttcaacatcagaatttgtagaacatccattcagcctcttcccactttcagggtctccactgaaaaatcaggtattattacaaagagcctgtacttatatacataacttggtctttttctcttaaagctttttgtatcctttttctgttctgtatatttagtattttgattactgtatatcctgggaagcttcttttctggccctctctttttggtgttctgcatgtctcttgtaccttgatgccaggctcaagttcagctttgtctccagcatgatcaaactattgaacaggagtctgactgggggtaaggggtgacaaaggcagatcctgagcatctgccactagtatggcaggaaaaagacgcctggttggctgtgtcagtggacagctcacttattcagagtgggcaagggacatttataccctaggaagactgtcccaatggtggtatgtcattggttggggcaagaacatcaggggtgattcatttgtatactcagaggcaacaggggccaggggaaggaatcttatagaaagtccagcttggaatgttccagtgatcagataaacagcaacccgtccctgtagccttggagaagcatgagcttattgattgctatgtgcattgaggtacatcttcactaggggaaacctgactgctggggtctgcctgggtaaggtgggtgagcagctaactcctgccactcttaggatgagaaaatcctggacttttcggtatgcttcaaccccttctgggcttcaggacagcccaacacctttatagggatcttttcctttagattggggaatttttcttctatgattttgttaaaaagtatttcatatgcaattgacctggatttctatttcttcttcttcttcttcttcttcttcttcttcttcttcttcttcttcttcttcttcttcttcttcttctttttcttcttcttcttcttccttgacatgaattatttgtaagtttgaacttttcttagtgtcctagatttcctggctactttgtgcctgaattttatttatttatttgtttgtttatttatttatttatttagatttaacattttctttacctaaactatttcttttagcttgccttcaagatctgaaattctctcttctactttatttactctgttagtgtggcttacctctgagttttttgtttgaatttctgagtttcttattttaagataatgtcagtttggcattttttcagtgattctatttctttgttaagttctacttttttatgttatttcattatttttttcaactgtgttttcagaatcatcttgaacacattcatgattgctgttttaacgtccatgtcctgtgcatcagctgaatgattttttctcaaggcttactaaaataaggttgatggattctggaggagacatattatcttcagtagtcatgtttatgtttttgtgctgtgatattggcaactaaggaatggtgtgtgtgtgtgtgtgtgtgtgtgtgtgtgtgtgtgtgtgtgtgtgtgtatgtatgtatgtatgtatgtaggtatctggacttgcctttattggtaagttttccacttttggttgctgttctcataatctgggccctagtcaagtgtgaaggctgagggttccctggtggagagcagttttgagttctgccatgtgtcatagctgtagagtccctgagtcccagccacgtgtggcaactgtggataaagagtggttctactggtggggagtcaagatgaatggaggtgggctagaattaatggctgaaagagggggcagggaaaaacccagagaacaattctgaaagccattttcttgatgttctgttttacctccctacctagacacacatgtacatacaagcataaacacatgtgtatttctttgtacttttctctttctctgagactctccttattatatctgatcccttttcttgttttggtgtttcttaatgttgtttaaggaaaaaaaatactttgtttattacattttttctatgcgagattactactgaaaaagaaccctgggaataaaataccactctgccatgtgttgtttatgtttgtttacttttcatttttttcggagacaggatctcattctgtagtttgtgctggcctggaaaatttgtatatagtccatgctaactctgaactcacagcatttatcctgactttgcttctcagatattactgttacaagtatgacccactagtgctgtctttcccccttaagacatacagaaataatataagtttgtacagctagtggatcttatgatatgaatggtaagaacgatccttttctttaaagtgtttaggacttcatgccatacgttgggaccagtgttaagtattttttccttatctaaaacccaatttgcatgcacgattgtatgcatagattttaatcccttgaaagtgtcggaaacccctgtaaggggcatattagcatatatccaaaaagttagactcaaataccatttaactgttctatttttccattatgggtctgtcagcaggaacatgttgccctatagtacatgacaagtgaaaacgccagtaacattgtttttcatagacagaaaaaataccaaagaagcaatttcttagctaaaatgtcacctgttagatgtatagggctcactgtattttgttgccctggtaacggctggtgtaaaatgactcctttgcactgctccatcagagtgattgcatcctgttttttccatcattttacaagaggctgttttcattctcccttcctgaccatattaagtgtaaagagattgaattactgtgctgtaccctctccattcgatgtggatttaagagttgatattgatgtactgagaaccctgtgcttcttcgagaaaaaaaaaaagctacaaattataatgaatttgacttttatgtatcggccattcaagagttgaagtagggttttggcacccaagggatagacagggcccgatcagcatttttcattcgaatgaatccaattgataaagcaatatacttggtgtcacttcgcttgatcttcaagtttaacaatagtcatgctaaaagtagatacattactctataaattttgcccataaaaaaagtgctagccatagctatctacagctgcactccttccaacttagaactgagcagggcagaagggaaactcattccaaaatcatgccgagtctatgcaagagcacatgtgggcagtgactattaaggcgccacctccctaccctgcccacaaccagccattgtaggggtttgcctctgaatctggctcttgctctcttcttagtggaaaattactctcccaagcgacaggctgctttgtaattaccaaactgtttcactgtgtcatactgaacaacttaatgcctcaaaaatccatttgtttgaaatgttcatctgtcctgcatttgaaacaagggagtgactttttttgttaagcaaaggtttttgttaatgtgtttgggataatttaaattttgatcatggccacataatactcatctgatgactttaaaaaaattgagatcacatagagaaaataatgagagtatgcaaaagaaatgacgctaagagagggcatttcagtagagtgagaaactcccttcctctggctaggttgggggcagcaggtgatccactttactttattagcatttatgtcatgggaaaaagtctctctagttaattgctttccctgaacacagcggctccctctcagaatttcataaaggctgttatgaagtcctactgcttggtcacagcatggggaggcacaagattctgcccacattgccaatttgggtaattgtgtacttagacatttttaaatgacttcaaccatgatgatcaacaatcattgccctttatccaggaaacactgcaaacatttaaatagctaagtaatgacctttttattgtttgatgattcttaatatgtatacaacaggacactgatattgagtcactctgtcagtcttctctggaaaaccggctatcaaaggttctttgttttaactctgtcttctcccctctttgctctttcccacagtcttgaacttctctctgtttttttgttttgttttgtttttcaaattctctatatgctacagactcattgatgtaaagtatctttattccccaaatcccttcgattaaatgcccaacttctaaccatgtggcttctgtatggcttctagagaacttgtcgtcctcccacatttatgcatttctatgtcctctgttcctgtgactctgacatgtagtgtaccctgaaggagcactggggcaccagaaccagtaggaataggaaccaccaaaaattagtaagaaatgatgactaacagcctatctcagacctagaacaactgctcttgtcaaaacagcccagtgacctgcttgacaagttccccattggacctcagttggtttcacagaatgacatggtggtctaattcccatcacatccatacccaaaagtacatccagctgatttcaagcaacagtgctatgataagtgtatggtcacgtgagtgctcttgcccaaaggtgtacttgttcttatgcctcttaaagagtttggggaacaaatttctttaagtagctttgagagggaacagccaagtcataagcttgagtgaacagaagtcacgtcatagtcatgagggtggagtccagtccctgcttagccctaatttcatgttctgtgatagcacgtgaagaatgacagtttttcctgtctcgagtcacataagcatggaaagggtgctgaggaatctttggaagctgaggacacacctttccctgattttctacattatgaaaatggacacatgtaagaggattttattagtagcatcgagttttgtctttaataagtaagagctttgaggggacttagaaagagaacactcactgacatgggatgccttgttctgctctgtgtgttcctgaagaaatcagggactttagggagaggtctttttgctttctcttttctcttttctctcgtttctgtctggcctccctgcataagtagcctggcacataataccacctgcttggaagatggtgaaaaaaagtagttctcattttgtactcaaccccaggaccagtcccttcctcatattttaaagaacacgagagagctgccaggtgtcagtgccttgtgaatacatttccttcttgggatcacaagacatggaggaactgacaactgtagtcagtcctttctggaatgtgtcacttctttctggcttggggtaattgaatgggaggtgtggggacaattactacagcaagatcaagtaattgtacacatagagagaagaggaccccttgctagtctttccttgttcacacacttacgggactgaaatacttagagaggtactgttcaaaagaaataatgcaactgtgtgtgtcattcaaggtttttttccccttataacctcattaaaacattagaaaaaacaggtgcaattaattttataaactgatcttaccagaaatattaagatgtcaacttgaaattggtataaacctcttattttttatctttctttcaaagtaaacctctgtaacctggtgtatatctttcactgacagtcacatgtgaccaatggagctcctcactggacaggctcagaaaatgttaatttaaaaacataggcttgcaaggcagtctgactggatggaagtcacccctcccccagcccccatggactatgctggtgtggcagcttcttactgttcttagcccttttctctctgacacctacctgcaggagacacactccctgctccagtgaggtccagtgcctggggcacacatcttttctccctccacctgacagagactttttgcttctgtccatcttggcagagggggagctcctctgcttcctgaataaggtagggggcataggacgtggattagtggacactttgcattcacaccaatgtttgctcttgctcttatcaaacacaaaaggctggaagtctcccttgtatccagacttcaagtcccttctacataccagttctttgatacctttaaggcaggtgaacaagaataggaagaagaaaaggacctggaatcttcagtccacctgtgtggaatactcctttatactgtgtgactatttgttactgtgtggtttaataaaagagctaaatggtccatatctaggaaggatttttcagggcagagagaatactgggaagaagggtggagtgtgagggtctcttgccagatgggaaagaagcagcatggaatgtacatagatgaggtaaatgagcctcgggcagcacgcagattaatagaaatgggttaacaagcctaagctattggctgagctttcataattaataggaagcctctgtgtggtttttttttggggggggaacagctggcaggacagagctgacagggagtcctgatgaaaaactctgcctacacccctgcctgcttgcccacctcatgcttggtctttggaagaatagaaagcccagcttcagtggcataagagtcctttagcatttatatacatgaagagtactcacattttgaaaaagagatagatttctccaggaaagcacactaaaattaaaagtaattagaagcaagcagctgagaaacaccccaaatattataatcgcttaaatttagtatgcatttattttgcttgaagatacctgttctgtggcctagaatatcacattctcccccccttagaaatacatacttttgtcagcagaattgtctgtcttgggggcttgggtatactttctacatcacaacttcaccccagacttcttcacccacctgaatctcccaagccctaggtttcatctagcccttagtcctgcccctgtcctcatatgcagaagcagctctcctcttcaggacagggctaacttagccttgttgatatgatgtaactgggtaaacttagcgtgccctgtgactgtaaatatgcctcctctcattcccagcctgggaaggctggagagccattatgtcttaattgggtaatttcttttttagatatccagaggcaggcttgtggcatcaaaggcagtccagtacaaggcatctggtaccagctgctgttgaaatgttgtcaattctgaaaggacctgggacctcattcatgggcagaatcttttaggatttaaagcgcttttacttaacttgttttgaaactggaaatctgaatccattattccaatctgtttgaagaagaaaatatttggtctgcaaggtctcttttgtttccattttctttctttctttttttcttctctgttttatgcacactgcacttttggaaatttcagcaaattgcaaagccatgtgtttatgtagcaaatgactttgttctagttcatttgcagcttacaaaatgtgtttggatggagatgtacataatgacacacacgcatcaacacacacacacacacacacacacacacacacacacacacacacacacacacacactcctcacagctcaaagaaaagaggtcagttcttggagttcataaattctaccaattaattgggccatacactgctgctgtcactgtgcagaagaccaataaaagaaaatgaagccaggagattcatttcagaataaaagcagggatgtaaaaatgtaagggaggcaatcttttgccccgagcattatgtgccaatccaaaacagaaggaaaggaataaaagcactgttgctgggaggagagggaggtagacagaggtaggaaatagcactgggtgctgttctcgccactacagaatctgcgcagcaaattgctgtgctttaaggagaagtagcaatcagccccgattgaaatatccctgaatgcagccataatgatgttcctcttctccctcttgtgtctggcaagataagccatcatcagaaatgtgcaccatcatgcagggtacattttctaaagacaagaacacccctgcatatgattccaagccggagagcaatccctgtgcctgaggtgcagctacagggccaacctcaccggcgtgtgtgacttgtccaatcacaccggggcccattattagaaagacctcatgcttcattaaatgccacggcattgtcaacttgaaattaaaactcctcataattatgaaccgggagctatgcatttcatcttgttgtagaccttgttaataccagaggcataaaatacagctatttaaaatgtctgcaatggaaagattcatgtacagctttcctgatcaggtaatcagtagcagggaaaaatagaaaaacaaacagtgcattctcatatttcatgagggtaactctccccttgtcatttgctggtaaccaaattgcagcaattgaaaacaacaacaaaaacaaaaacaaaaaaaccagcctgctgccctagaccccagctctgcatccatgatccaccaaggcagttctaggtgttactattaattggcttgagtcacacagcacccaagtcaagtcacatcaaacattatttgatgtgacgagacataatacgaatgggtgcgaaacagaattggaggaaagtatctcctgagtataatgccatgagtgcgagggacaaaagcaggagaaaaaggaggacagacaccacaataaaatgatgctagaaattgtatgtgattgtgtttctttgggtttttcttcacagcaatgatcatagtacagacctgactaaaagccaccttgtcacttttttgaagattttcaatgcaatattcttggatgtgagtatgtcatgggtaattctcttatgcctgcggaattagcacacaaacatttcaaaaagggattttaaggagactgttgtcaaaatctaaaatgcacaaacttcccaaaaggttctttggtgattgtgggaggggttaaattgaggtctcttcttaaaactattgttaacggtaacatagagttagaaacagatgactttggagagagaagacactggtaggatcagataaaccttgacttcaaaccaactacctgtctctgaaacatgtccctgttcatatcatgtgtaattatataccaaggaaagggtatgaaagactgttggctcttctaagtaaagagtaggtcacacatagaaagggctccattgccagtgcctacatctcaggcattgtcctctcagtcagatttcatgaaattaataatcaaggatcttattatgatctattgaaaggaagaagtactgagaaactgggttccagagatgattccatcatcctaggatcatagtagaatgagaaagactcaccccaggagaacaagcaaacaactatgtgggaggaagttgacagctatttatagagcccagggccccaaggtataggtcaatgatatctgagactatagtactcttatagctgcaacactaggaagaatgaaaatgttcactacctgcagtacagcagacccaccctctctgcatgatacatggccctaagttcacattctgatccatagacacctgaaggccaaatatctggggcttagtcctggctcaatgttgttcctgaaccactctcacttaagtaatggaactaattatgtaggattcagttgcatttaacatgtaatccagagccacataatggcatttaggtcaacaatagaacatacacacagcaatagtcccataagaatataatgtaggtgaaaaattcccattacctagtgatgtcttaacaatttcatagacaatcatttctcatgtgtttgtggtgaggctggtgtaagtacacctggagcattgccagttgtactcaagtacatggcatgcagtcatttaataatgataagaaatgactttgtcacatgtgtatatactcccattactttagattatactcctacatataaaagaatgctttctataaaatagtgtgctaagttacaccagcagcagcccatcaggtatgtttgccctgtcttctgattgaatcagaaggcaacacagtgtgataggcctatactacagaagtataaggcactctgatgtccaaagtatgatgaaactgtatttctcagagttgcccgctgttaagccttgcataactaaatctgctggtgtggtgtggataacaatgcaacagttcataatatttttgtcaggaccccacggaaacaaatgcatgccacttagaagaaggcctgcacacaccaaacatttaattaataaacatgcttgatatgttctggttatttctttcccatatcacattagatgactttcataattaaatcaaatgagagatcacgtgatcaatatagttattgttaaggcaagtttggggaaagcttttcctgtcagtttttcttcttcaaatacaagagggtcaatgattgctaccttctcagggaactggccatcttatccagacttcagagatccaaaagtctaacccagtgatagactaaggtgatgtaatgtaaaacaatgcatagactgtgcgtgactaagaagtcttagctgagagctgagttactgctctgttcttgtactcaggtgcctgtatctggttaaaatgtggaagatactattctcaaggtctcagagatcctacgaatgtttaaatgttcctttatcctttttcaccttaccaacagcccccttcccagatttccaaatccatgaagcccaagaaatgaactcagttctttctacagtgaaaaccctattgtgaggaagaaataaatggagttttaagctcatgtgaactccgggagtgttgctttctttatattaccaacgacacctctagacttacaagaaggaagatgggaagtaaatatccttatgatgtagctgagagaacagtaaatgttctatttttagaatgccatgtcggtggaaaagcccttaacctactagaaggcagccttgcttcctatgtgctacttcacatttagaagtttattggctccatggcttccccatgaaatttaagatatgagatgcctttaaaatttttttttaaatttaaagtttcaaccctgctgactttctttgtcctgtgaaattaagtatagagataacatgagaggcatgaaaagaggccttgatagtagactaagacagtgggtcccacttgcctgccatgggcctttggtcaaataatttaattgccccaaccctctactgtcttcattagaagatgataaaattctgacttttggtgactagaaataagacactgtgcataatacaagatgtgcctaaccaatgagcaaatgggacagtacacacacagctggtcttcctgtctctcccacagctactgtaacttagtttgtggcttgctttcaccaaagctacacactattctagtcattctcccaaagtgatagagttacattttcaaagcctagtcatgtaaaacagcatcatctgcacaataaacatttgcaacagattagcctgtcagtctttatctatggtgtttctatcaacaaaggaggggggcatgtgtttcacttacactaagtgctaatgcctgggcactggcagtagaagaggggcatctggcaacctgtgggctttctagaagggaaagtcgtcataggcgaattgggatagaggctgggatgcaaataaccttacagcaagcactctgctgctcaggagctcttggcttatttataattcaaagctggtctgaaaggcaataggaaaatgacttaatggcacctcctcagcttgcacctggagagagttctgcaaagacccaagaagcctggagctgagccatgccaaggggatgtctcaggggctaggggtcacagaggggctggattggcttgcatagtagaaggctggcaatgacaggcatcccttgtgtttgcttctggcctttgttttcttcctctcatgcaggtcagagcatgttggacacctttgggaagcccttggctggttttcctatgcctgagttcttaagagaggattcaaagactcttctagctgaggtgactgaagggtagaacaggagtcttgggggaaggagagttaagcaggcagttagggggactgaggagaatagataaaggtttgcaggtgtagctggtggggtcactacaggaaataaaaagcaatctgtccatttctatgtgaaacagagccagaaggaagggaagggactcaggaccaaataacccaaggctgtcccttggatgcagaccaggccccactgagatttcccctcccatattgctgctacacagggtgtttatggcatcagtggcaaggagatggcaagatgaagtttagtgaaaggctggcctggatgtaggcccttggcatctccaagacttccttcttccagcctttaggggggttttgtgtttatcatcttcataatgcccttcgccttcatcacattcaaagtagaactatgttaaaatctgaaaggattaatgaggtaatataaaatgaggtcactccctcattaaacaaagggctaagctgtttaataccaactttgacatgcacctgtttaaccgatttccatctgagtctgtgggagccagagctgtgcggtagttagactctgagtatgaacttgtgtcatgagatctctttaccctgagctgacctcaacagccaaacaaggcacaccatctgcagtcagggaccagctgagacatgtatggctacggcacattgggcagacagcagcctctgccgctcctaaattggcaggcagaaagaggccattttcaacctctattctaactcactgacctagatttttcttgtgttcattaaatgtcacgttccgtagatcaaagggagaatcctgtgaccttgaatgaatctagagtgaaatcgcagagcaactgaatttcattttatattttcactgatcctcagccagtgcctatctcccccaccatcccttggtcccatcaaattaaacagaatccagcaatggcacagagctatggcaacaagaattccagtcttaagagagacttctaaatgagtaaatctttttaaatggcatgaatagattcagctaattgggccaaagcacataatttatctagcttggtttgctctccactgaccagtcattttgtagcctcatgcattggaggatcactgggccaggggagcagcagaatagcccctagtactttgtttcatttggtgtttttgtttgaaagactggtaaaaaaatgtctgggtactattctatgtttgtaaattggaagaaacttgatggattcagatgtatgctgctaagaaggaacactgatggaagctatagcctggatattgaggacaagttttcctcttacccaatagcctcgatggggacaaagaaaacttacaatgaggtcacgtgactcgtttggagcccttgattgtgtcagacccaaaagaaataatggttattagcataccaaagcacactggggtggagtgtgggaagaggtggggggtgtgctcctgactcactcagaatctgtcactcatcccagctcttctcatcaaaccccaaacctaaacatctccagctcaagggcttcccttcccccagcttctcattcccatgtaagtctactttactggtcatgacttcttaggccccttctcttttgtctctctttttgttctctctcttttgtcttccactgtcctcttctttttgctctgtttgtatctgtctccatctccatctccttctctgtctctttctccctcttcctttccctctctgtctctcttatttttctctcttgaccctgtctcctttttggtctctctctctcttcttcctcaccatggccctatcagtctacaggccatgtttactctattcctttctctccctgctctggtctcctccaggtgcctctggctgttctctccctcatgtctacaaccaaaccctgcccatctgccataccttggaacactcatgtcctcactatatatatatatatatatatattttttttttagttctgacttggtttatgtttttttgtgtgaattttcttttggggttttgtttgcttctttgcttgctctttttttcctatttttttgtttagtggatatgctgaggtaaaaagaattttatagaaagaaagtcagtcattggctattaggaaaatatagagagaaacagcacagatctaaactaaggtattaaaataaaaaaaatgagaacatctggaaagacattcaaaaagtaggcctcatacatcttgttacatttttgatgtctgtgcactggggacaagaagtggctgaggataactgagttttccaccatgttataaaagtttgtagagcaggaagcaaacctctgaagactggcacgaacaaacgaacagcaaaatgtaataaagaagaaagaaattacccttggtgattctgaaactccgtgccttactacaaggcctggacacgtacttgaggaaatcatctatcaattttcagccttctatgacaaaaagatcctgtgttgcaacttcaacagcttcccaaagatcagagggcataaactaatcctgttacttcctttgctggatcaacagtccaaggtgacaaaggagagtgagattgtgatcagtctggacttctgctacagctttgataatgagctcattttccatgacattttcacaagcaagtcaaaacaagggagtttattcaggattgcactcactagggcaatcccagaagccaaaaggagacaaaatggccgggaaagaagggtactgctgtcaatgaatcttcttctggtctttcttagcagctactgggaaggggagctaacctttgcgtcttcacttggaaggggttgtcaacagggtgtcgcattatcaataacagtgagggaatgctcttgttccttaaacatgtttagatagaacaggatagggatctcagtgggtgatgccgatgtgacagggagagctatgtgagggcatcatacagccaaactttagtgggcagctccctcacctgatgaaaatgatgggattctacacaagaatcatcatcttagcctcccacatctcacttgaatcttctagtcaaagtttcaatatgttgcaaatagttgaaataactcagtttgggttacttgagagtttataagagtgggatagaactagactttcaatcatataagaagaatgtgaacaagaatacagaagaggacagtgcagaatgctagatccaaagtttgcttggtgtgtgattatggtaactaattgtgtggggatgttttgagacaggttgagcaagcctgccattccaaacagtagtatccctagctgctgaatgatgcctgatttcccaccattagaaatgaaaaataaaatggactgagtgacgtctgtgagtcaaactctggcctctgactaatgtcttcttaaagctgtctgcacaggggctccatcctcctcctcttaaaatggatgctctatggtcaagagaagccaagtcacatactcagaacccaatagtggaccagctagattaggagtcagtgagatggctcagcccataatgacattcgccaccaatcttcatctcagggacccaaatgttggaaagagagaaccaaatcccacaagttgtcctctgacctctgaacacacacacacacacacacacacacacacacacacacacacagagagagagagagagagagagagagagagagagacagagacagagagacagagagacagagagacagacagagacagagacagagattaaatgaattacattcttttacagcaagggtgatcagcttcagaacctgtcttgattctatatagggcaatcctttgagttaacctttgcataggctcaagaaatttaatacttctaatactgaaaaattatttatatattttagtacaaacagcttttataatctcctcagaggtcctggaaggaaattgatggtacaaaaagatgagatgctggagatacagcctccttggtagagtacttgcctagcaggctcagggctccaggttaatccccagagccatataaactgggtatagcagtgcatgcttgtaattccaacacttgggaagtagaggaagtagaatcagaattcaaggccatctttagctacaaagcaagtttgagacaagcccagtttacatgagaccttgcttcaaactactactgctactactattactactactactataataataatagtaataataataataataactgagaagagtagaaataatgtctcaacatatgagataatggagttcaggaaactcagaaccagagatgtaaatgccttaagaaagacttcttggctaaaccactttacagaggatcaaaactatgaattgtcttaaattcagagaatggccccctgttccaaaatacacaatccaaacatatacatcaaacatgacacacatactcagacaagaatgaattagattggtaatagccctataccttagaaaaccaacttgtcactggctataaaatatcacttggtacacaaagatgaattttttgatgcaagtcccttagttacacatggccaaagggtgacttaatcccaggtcttttgaattcagtggacaagctatcaccctgagaacaatattagtgttttacacagtgcttatttgtgcttttctgatataaggggtttggccggtactccccttctaggccatggaggtcccttaatacacaattgtttgctagtttagaacataagataaaactaggttctagaacgttgttgtagtataaatttgctctttcagtttttccaaaatgtgttcattcttttttctattgggcataatgtgctgacttcctttgggttggtctcctggttcatgggaaagtgacacttttccacatacttcatggaaagagaatgcaatctttctctgaatagcagaaattcaaaagtattctagaacagcatggccaaaatttgctcccaccctaagcacagttgaaagcctcccctggccaggtcaggctatggggaatagaggattgatggcacaaggaatttcttcatcaaactgcactggaagacacacataaatttgagccattacaccccaagttatgaatgcagcaggctcgattttctgtctctcataatacaaacatctcaacaagagccatctatactgggattgaataaaaactaatgcactgtatggttgactggctgaacttaaataagggttcacagatggcacaatcagcaagtgtatcccaaagcctcccatgaagaaggcataaggagagtgtcagtgatgctacacagacaggctcatttaggtcatatgctctactctggtcattgggggtaaccacaggaaaggaaggtgggcaaggcagttccacacatttgcaagagcttgacacaagagtactagagctaactgatgagaaacagcactttgatgtcaagtaagatttggacagcaacagcaacagtactctctgccctatttggaaaccgtatataaaatctctgagatgccaggatttcctagttttatggaagaattttcttgtataataatttttttcaaagttagactaacagcagcaacagcactgataacttgtaaaaaatgtacatttttttctggccccaccctagacctcctgatccagatactggggatggggcccagaagtctgttttttttaacaagatttgagagtaattctcttgcatgcttcaatatgaggattcctggccttagggtttcttagatattcttaaacctagatgttcaacaaatccatatgttgaaaacataacccctagtttgatagtattagttggtgggtcttctgggaggtatcaacaccataagagtagagttccctggaatgagacttgtgtcctagagtgatcactcatagtgtcaccatgtgaagatagaaggttactgctacctgtcagccactaggtagtagcccatactatacactttggtcatcattgtcatgtcctagttagtctctgagtgtgagagctaattcctgctgtttataagccatgtaatcttggtgttttcttgtggaagcctgaatagactaacatacttggtattcacaagcttgaattgggaacaagttccatttttattttcactatcctctagtcaaagctcagcctttgtgttttgagcatgggtggacaaagacccagagcatccagcaaaactgttgacagagtttatttcttgtctggtcccgcagccatttagctccaataaacttacagaggcttatattaattataaactgattggcctatagctcagacttctcattggctagctctcttttaattattaacccttaactatcaatctatgtatttctacatggccttattttactggagaatgcccgggcctgttactccttcagcagctacatggcatctctctggtagcttctctgcttcctctccccagaagtctccttgtctggtagccccacccattcttcctgcctggccaatcagtgtcttattcatcaaccaacaagagaaacatatatatagaagaacatccaccattacagcacatttgccagctgaatggagaggtattctcagatcacattttaggggttgcagatatgttaaaacatcattgctatcttgaaattatggtaattatgtggtctgttgctagttgtagttattactgtgtttgtttgaagcacttttggttaagatggtgcagtgtctggataagataaagtattctattgtgaagagaggaagtgctggtactccacaaaaggaggcatggggcaggtgacaagtggagagaaaggcacagagcagggacaagattaaaggcagctccccaggggcagacagtaaacagaagcctcatcaaaaggaaggcaggcagccccagtgaaaagaaagtggcagcctttccctcagaacaagctcacaggtcccacaggcctcaaatccaagcagagacatcggcttacctaggtcagcagatggaggggttctcccagctcagagggctgtggcccagtgccctctaaataagaccattatttaaaactgagcaaccctacaggcctgagaacagggaatagttcaaacctgaattcaacctgcttcaggtctaagaatgaaataagccctaagagacagctgtagacaagggaagggctacataaacaagtctcaaagagccaaaggcagaaagctcagctgggacagtacagtaaaggagactggtgtcaggctacattatctgaggtaattctggagtttgatagccgtgagctggaggtcagcaggtggaccagtgtctggatccagctacctgctgtacaattcactgttacagagtggagaactttgaagaaccaaccaattccttagtgtccacagatgcatccctccaatagagtgattaggacttagtggcttatcaaagtatgaaggcagtcctctgttgtcacagccctcagtgttggggcttccccgactctcaacatagttgggagacagccctcagccactccagggaatatgatgtgaggactctcagtggaggacctgtcaagattacatgctacaaagccaaccataggcagcagaaacctttggatgcaaagaagagaagctatggaaatgaagacgaatgataggcatgaggcactgtcaaatgcgtgtccacacacatcataggaaggccagaagtccactagcttgactgttaacccttccccaggtttgtgcttgggaggctttgagtaacaactcagaaagagatctttctagcgctttgactctttcttcttcctttatcttctctttctctgtcccattcttcatgcaattatgctttttgatccgtgtgtttccctttattcctttttctatacctttagcattagtttttgtttatatttttattttaatgtgaatgggtgttttgcctgcatgtatgtctatgcaacatgtttgtacctgatgtctgaagaggccagaacaaggtattctgcaatcctttatggttcctcatctgcaagctacaaatgggcaaagacatttttacctgaagccatcaggcagcaaaagcatttaggaaatgagtcttgacaatgactccaggatcagcttttcaaattttcaatttgcaactttttaacttggttatgaattttctgatgactaggacatctttttgatgttgttgttttctttaaaatcttgtttttaatttttctgatctcttttttctctcctctgtcattgtatttttcatcatcccccttttgttaatttgaccttgcttttcttctatctccctctccccttcctttatttctattccctcggtatattaaagaacttctcacactatgcattatattttttatgtcctgttttatggtataataatgtgtcatgatctttaatttattgtaattgtatttacatactttgtttgacttggtgctatggctgctataatcagattatttttccttcccaagaggtactaatattgaatccccaagagtagattattcacaaagaagagattcacaaataaaactggaagagatgtccaaatgaacagatgcacaatcacaacatgaaaggttcaggcattctgctggcctgcccctgttacctggtggaatccactcaggcaataccctggtcagcccaaggttccatgggaaagaagtctgcacgcaggtgcagaggacccctttaaaagataggctcctgcccctttacgctctctctctctctctctctctctctctctctctctctctctctctctctctctctctctctctctctctctctctctctctctctctctctctctctctctctctctctctctctctctctctctctctctctctgtgtgtgtgctctcccgtctctgtttcccctctctatctctctatggcgaccggccatggcggtcagccatttacccctgttcctcttcttagtctccccattctgccttagaataaacttatagtcaatatgtctggctcagcaatttctcttttcttctttttaaacaaaacaataacattttggcgcccgacttggtttaggctctctccgtagacactctcccaaagctaactggtgggatagtttttctttctttgtaacttttcctgccaggagcacgggaaatctcagagatcctaaaatctgaactcataacccacttccatctttgcttgtcctggtactccctcctgcctgcagcagcctgagatgccggaattcaacttgccgcttttccaactaagtatttctggaactcactgatctgcctattcgctacaatccggtaagaaacccaaaccgttcccatggggcagacccagcgctgttcactctgggtccatttttcagtttcgggccgggtgctctcagacagggcaatctatgcatttttctgcctagcccacgggaaatacatttttatgggatctttcggttactggcagcgagtaggtaaatgagcggagttctgcctcccattgggaactttctttcacctgggaatgtccctcattgttctgtttgttctttctctgactgtttcttcttggttggcaatgtctgcttgagatgctctgagagttttgtttgtctgctggttttcatttttccacataaatgaggtttgaaacttttctggcaattgagaatgtggttatgggggttgccatcggccacgtgtactaatctgggggccgccatcttggtcataaccacgtgacctggcttaggcccacccactcagttcaatgacttccaccggcaagcactgccacctgacatcttgctttttatttctttcacttgttgggtgcatttcctaaaggtcaggcatgggatcccgctccaggagcggtgcttttttgcttttttcagttcgggtccttttttggtttcgggacagctgtgtccccttcggggccaggcccctggcaactcccacgggcagacgtgcatccgtagaggagctttttgcctgttttccacttgcctcacccatgggaaatgcatagagggacctttctggtttcatccaacaagcaggtaaacagacaaaagcggtttacggttgccaccgttttggtcatgtgacctacctgtaggcacgcccagctccagtgtcctttgccagcaaacctgtctgtcagccagatctttttgctttttattttatttttgtctttttcttcttattttattttttgtctttttcttctttcaccggctctgttgttcatggcttgtttactaaatactgtgcctttccagggccctctgtttaaatctactctgtccctttaaatctcctgtctgtttgctacaatgtatggatcagagattacattctgactccccctttactgttatccagtcctgcttgtctctgtacctgtaatttaactttatacttatctagctctatatgcaacttaaattaaactaaactgtctcaaatttctaaattgctatatatctttaaatgatggtaaacatttaaagtcataaagttctaatctacctttacttaaaatataagccaagtctatacaacttaaatttaacttatgtatctttaaatgatagtaaaaatttaaaatcataaagatctatttcaaattaacaaaatatttataccactcagtctatcctataagccgtttacaaaggtacagcttttattacaaaaagggatttttctctaactaaaggcaaacttaactgctaagatcctaaacagacagccctcaaatgctcagagatctagagaatatggcatttaaaatgttttgttagaaagctttttatagcagagagataggccagctgctggccccaccccatttcctccgagaagactgatgagcactgaagaaacttcatctcgagtcagtgacaacactggtcactgagcaaccctgcccttcacctcaactggtacaaagtattccataccatggacaagaggacaacggaatcgactttcccagcgttgctcgggccaacggtaggcaagtcttcccaaagtctgtaatccataggtcacaagttatcagcaagaaggcaggtgtcctgcagcccactactatggatggaggaccttgggggtggctgtccatgcagcctgctggcaagtctctgttattctttaatcattgattcaggtaaaatcttatccttctcaagaactctgatgcttttgacgactgatagtcttgccggcttaaagcaaaacagattccagtaataggtattttaaggtttatctatgtgaatataggaaagtctaagatgtatgaaggcctgaggataaaaaggcttaagtgatgataatgagttgagacattaaaaagaataaaaaatgttcctgatttctctatttctcatgctactgttcatagtctacaataccactataggatcataactacaaggccaaggttaagatgcttttcattgtcctaaaaaatctgtctgtatgggaaaataatgaataaataaatgaaagaaactatatccaacaatctgttacctcggagaaacataccacactggcaaagacaccacagactgagagtcaaagaatccaagtccttttatcaagcaaatggaaaccaaagcaagctagtgtgaatattttggtatctgataaaaagagaattcagccaaaattagtcattattggtaaataatgtcactgcacactagtagagaaaaataactaaatcaagaaaatatagttggaaatacatatatattgaacatttatattcccctatcctgtaaaacaattactatatcatagcaacagaacctacataaatattgggagactgaaaaccaagcagatgttgatacaacatgacaatagaaaaacaatctaaatttccataatcaacataaatacaaaaggaatcaacaaaatatttaaaattgaatttttaagaatagtttaagattgtacactatggtcatgttagtttcatcacagagatgcaacggggtggtttaatataaacaaatcaataaattgcaatgaccagaaatcacatgatcatctccttctcttgatggtcttctttctcatctttcaaatttctctttctttttttaaaaagatttatttattatgtatatagtgttctgtgtacatgcttgcctgcatgctagaagaggacatcagatttcattatagatggttgtgagccactgtgtggttgctgagaattgaactcaggacctctggaagaacagtcaatgctcttaaactctgtgtcatctctccagccctcataattctcttacacacacacacacacacacacacacacacacacacacacacacacaccacttaaatctagattctgatgcatatgtcgcagggtacataatatttgttaattctatcttatctcatttactataacaatctttagtttcatccatttccctggaactatcaacttattattaatttaaattttctatttttgtttgagaatttcatatattaatactgtatttgtatcatttctacccttccctctgccctcttcaagtcctcttgtgtctcccacatcccctttcaagttcatggccttccttcaattattgctgttacgtattgcatttattttattttctttcagtattttgggatattactttaaagtctttgacccatttttaatttctttttttgttgtttttcagggccagacatgaattaaagaacacttttagtgtgatcatccaattgtttctttaggtttttaaagttttcattgaacagatctctcattctttgattagatgtatttctaggtgctttattttttgaagctattgtaaatgtgattttttcttgacttctttctttgtaactttgtgattagaatatagaaaagctactgatttttgtatgttgattttgtgttctgctttgctgaaaatgtccataagatctaagaattttctggtgaagttattaaggtcttttaagtataaaagcatgtcttctataagtagggataatttgactctcctttgataattttatcctttttattttttcttgtgactcactgctttagttgagatttaaggtaccatgttgagtgaggatgaagaaagtgggcacccttgttggattctcggtgacaaaggaggccaatgaaggggaaaagcaagcaagaagatagtaaaatgattggtatgcataaaaatgtcacagagactcctttctttgtatgctggccgaaagctactgttaaaaggtcaatgaaagaaacttgtattgccatatttaaaatctttaattgtgttgatacctatatttaaatataacttatttcctttgcatatctatacattttgttatatgttttgaaataataatcccaggatgaaggccccaggctctactgggtctttggagaaagatatgatgcatctgagcctctgccttggaagtagctccatctctcacttcattgttcccatcgagaggacgagaaattatctgaaaagaaagagttctagaagttgccaacaaaatcttaggtcgccaactctccctctgcatctgactggaggtagagcaggcattctgcttttcactccttgtatagtaggctccaggatggtttagctctgtcctgtgagcatcatctatttctggcctagaggaccaggaagtgctctggagtcccacctcatccaagtcgtctttgaagatcacaaaacaaattgcttgacccttgatttccctttggctccgtatgtttctttttggcttttctttaaggcgctatgattttactaagttatcctggttggccttgaacttctggactcagtccttctctgccttgagtacagctgggactctaggtatttcccactatatctggctcatgtctgtttcataattgtttcaaacccaagcagcacagaccagcaccatgcttaggctcttttaaagcttttctggagtggatatctgcctgcatttgtgccttgttttccttctcaataggttagagccagaaggtttcttaattgttcctcatgtggtcctggtgctaaatgccacactaaagcagaagtgatgcacttagaatagggctttagcttagctgcattggtgccctttatgaagtgatattagtcaaggtcatctttgtgcagcccaggaattccataaggcagctgtcaaagttcccttagccactgggcacaaaacctacagaagctccaaagacaagacactagctattctctagaacttcagatcaaatattttacccatggcagtaccactatcaacctcttaggaaaacatatttaaccttactgtgactaaaatagagaaaccatgattagctatgcagtgtgcaagggcacagggtagcaaagatgataaatgggtccagaacttcaaatgggtcgccacatcagctttgttctcccactaacgtgcactgtttaggcacatttgctatatgaagctccacattgatgcctttcctccaacagttaccataatgctgtgagcaagcaagattaccaatattcttttgtaggtgaaagaactgaggtttaaagaaattcaagtgtcttccaggaccattgatagtgatgcgactaaggagccaggctcctagtaacaattcctttcatttttcttctattggagactggctgtgcctccaggtcaggagccacactgtctaaggcgcctgactccaaatgttttcacaaggtatccagttgaaacctcatgcaatattatcacctcaagtagatgagaattaggaactagaagaaatgtacttgatcttcagcaatccagagctgacatttgaccccagttttaacccaaatcaaaacttgataaattatggtttaaaaagctttgatggttatcgttccttacccatagcctctgagcctgccagtcttgtcgtataggaagctggcaggccacatggacaacactgccaacagaactcaactcacccaacagcacagccgcttgggttttcattctgcttgcatttccaatgggagtatttgctttatttaagccctagtgaattcctctgactcccattgcagacagttatttgctacaatatgatgacagcatatttcccttttggaatgttgaatggaagggctgaaataatggtcaaccctccccccttctgatgaaaagagagggctggaagaacatagtagctttgacgtttgtcagcttgttagcaggagtcttcgggacacgtctctatttctgtagtcagccctagttggcgctaacaaaaagtgactgcagtctgggcatagaggaaatttcattactgtgttaaaaataatcgaataaagagaatgagaagtaaggccaagttgtcctggtcaaatgtgagacaaagcatgcttattcgggcttacctaaggggcaacacgtgctattttgaaaagcagttgtttggggacattttatgcgtggaaatattggacatcatgtataattatgctgagcagtgaggagacacctgcttcgaagctaatatgataatgactacatgagagactgaaggagagcaactaggaatatagtctcagacttttgggttttgttccgttaaaaagtaaaagcctcattaggaaagttttaagcgagttatatttctccatttctctcgcaattaatttttatgcagcccaattgttatttgcaagtaagatgcttttgccctgagcagggtggcatgagtcagctgatgaccagcagagggcagtgctgagctgaagctggctcaggcacttacttggggctataaaatggtgcttattattaaatgaaatcttacggctaacttagccacagaggaaattaaactgctaattatgtgtgtttaaaccactagaaagggtccagttgttgcttcagatttcaggaaacacctacctcatctctggatttaaaatatataattactcctgaaaatagtacctattaacaattatatacaatactttttaaaatttgtagacttactgtttgcatagcctgtctatttttaaccatacaagccatagattggtggctttagcactgtgttttctttaatagagtatgtcagtgattttaactgagtaatccatgctcaaattatatacaggtcagaattctaaaggcttgattagataaccatattgtttttgtggcattttctcaaaaaacataaacaaaaacaaacaaacaaacaaaaaaacaggatttctgtggaggcaaaaatttgcaaacctggaaagggtcagtctggttttctggaaagagaaatgattcagctgtgcatgcatttagacaggtgatgtcattgtcaaattagcctcatgaccatgaagtaaaacagacatctcagggaacatgaaaagtcaaggaccagccaggactgggttgggtcctgtgccttgcagcttggtagctatccatgcatcaccacacaagccaaggggagagaaatctgacgccaggtagtaacaaaaatataaataggaactggccttgaatatccgtcagcttaatgatctgtgtggctcagaccctttggtttccagccgagttttcatttttatgttattcgggatctaacttatcacagtgtttcctgaggccagctgtagtacctttcccccttctaaactggaatctgcattctgacaagtccgcacaggatttgcctgcaccctcaaatttgagaagtactatgtggagtctcatatctaataatctaatttctcactgagttttatttcccaccactttaatatagagatggctcataaagccccaaatcactcatttgtaattaattaaagggtgtgtgcgtgttcgtgtgtgtgtgtgtgtgtgtgtgtgtgtgtgtgccagttgctgctttttccccttttgtgacaaagaaaacgtttgaaaactgtaatggattcctttctccagctggacctaatacactggcctttcctgacttcaagagaatcctggaagcatgaatgccacctacaacaggctcttgcagatttactttatacggtggccctgctgagagtgagctcccggggtcaccaccctgtcacggctcttctgtccactttactgcatgccttttatgggtctcatgaaaaaatgataatgacccgttttcttactcatcaaaagctataaaccagaagcctctcccacatttctggagcaagaagggcagtgtggctaagtcagcctgtcagagtgacgaggctctccaccttggcaagtgagattaatctaaatcaaatacttcccagcttgccaattgcaactaattcccttgagggagtacaagagctacgcgaagcggatacagtctgcgcaaacgtttggtaaggccaggcaggtaaaaccatcttctaatcttgttaatgtcttgtgctgctgggctctgtgatggactcagaaatcactacagctcctcaaccccgtattacaaagaaatgcagctctcagggctgaagaccaaatcttcccggcttcacagcgaataacttggttctgcctagacaggcccactgcgttggataaactgtgccccgcgtagtcttcctgcctctgtgttaggaataatcaaagaatctaagctgctaggctttgcaagccgtgagctgaaatacttaggcaacgaattagagtagcttgtaccagcctgtctgtagactggcaatgggagatgcaggctggtgggcgggctcaagtgtgtgtccctaggatgggagctggacacggtgctcccacccctgatgcatacttaggatggacacccgaggcctacaggccaggagcaggaaggactccttgggtgacacagcagagtgtctcagtgacctgtcctttccacctgaagcagaaggatatgactgcagcagaaatgtatgattttcttttgctttgtgagcactggcccagccccagcatccatccatccccgccccctcccaagccttctttccccttcctagctttgtaataggaatacatgaggcaactggaggatgaggtgtttgtctgggggcttttaacggtgtttcctttgttttgtaaatcaggctttctgcaattggttgcacttacatgcaataaagtccacgcgttttagtacacagttctatgagctccgataaacaagcaccacaacaatgaaaatcgtgaacagtcttgcttatccctaaaatcaactgttcccctttaaagccaagtctcacctcaaaccccaagcagtctccgtctgtccccacagtgttatctttagcgctcaggtttatttatttatttatttatttattttttattttaatttttttttgttgttttttgttttttgtttttcgagacagggtttctttgtgtagctttggagcctatcctggcactcgctctggagaccaggctggcctcgaactcacggcgcatgcctttaatcccagcactcgggaggcagaggcaggtttatttatttttaaagcctttcttctttcccagtaactggaatggaggtcagttagcatagtcggagagagagggcagaacaagccaggcaaacacaggttcaatccagctctgcttccgggctttccctgacttagaacacactctcactcagttaacctgccttctcctctcctaactgtcaagacaatggcctgcagcatttactagcacagttaagtgtgacttgccaaggagcctaagtcacttggagctgccatcctaggaggctgtacctatctctctcctgttactctctaattaagtgtccatatttgaggacaggatcttagatcccatgcctttggtcttctgctatgcctatctcagtacatgataagggaattaccagccacaccgttatcttaggtacttatagctatcctatttgagtgtatgtttcaaggtttatatgagcttttggatcatttcacaattcgcttttctgctttcatttactagtatgactagacttaccattatttaactagtaaattttatttcgtttcataagcaaatggtttgctatcctgaaacatggtgtttcctgtgtcttgctgcataaatgcgcggcaattctgttgaataggaatgaaacgcaccaagtaggaagtaatctccactggggatagaaggagggaagtcactaggaaatagaagtaggcagagaattttcctttttcctttaagagatagggcccaggaggagctggcaaatgttaacatctgtttattaattcttggtgagaaattaatgacttctcattattttaatatcctatttaaattatcttattattttaaaattcaaatataaaaataaatacatacaaaaatattaatgagcatattcctatcctggaatgtatagtgcttaccagcagtactgattttgtgcttttgaatatttcatcagtaattaattttctaaggtctaatctttgagacatattctaattaattggggaattgaaagtcaagcgtcaagttctatggtaactaccattccttcatcaagaaggtgtttctgccgggtttttctatgagcgtctaagtgcattttcctccattcttgtttgtgttgtgaaggttaaaaatgagcatgtgtgctgaggctggtgtgatggagcaggcctttgtcatagtgtggggaggcagaagcaagtaaagcctgtaagtgaaaggttcaggcattatgctggcctgcccctgttacctggcagaatccactcaggcagtaccggggtcagcccagggttccatgggaactaagtctgcagcaggtgtagaggacccctttaaaagagaaacccctccccacttacgttctcttctcttctctctctctccccctctctcctctctctctctcttctttgcttctcttctctctctgcttcttctcctctcttctatttctctctcacttgctctccgggatataatgaactggttaatgtctcatgtctcatcttgcacttcttctttctttctgatttaagtaaaagaataacagtaagttcaaggccagccaaacacacagcgcattctaggccaacatgggctacataagatgttgtctgaaaaaagaaaaggaaataagcacagaataccattaaagataactaggtgaggttcacatgttaaaaagaaagggttttgagacatctgccagtcacctcacagcctctctttttggacttggccaacccagaagcccaattggccaacacaagggcccagggcagaagcatggtcttgactagctttagtcttcatttgttttggacaggaaataacttatcccattctttccttttaatggctttccctggtacttagtcccatcttccccactttggtgacaatacttatcagtatgctcttgaggtagctgagaaaataaacaaggctataaaaatagaaatcacaagaagttcccctggctgaggtggcaagcaagcatgtttctccacccccttgtggtttgattacaggattcctgctgtagtctccccctgggctcattacattgcccacatctgtcacacaatacaagattctgccctgccaccccatgtgggatacatggcatttctttggcagacaggctttattttaagggggactgtttgcttcctgaaaaaaagcataggctccaaaatgatccttatcaagatgacctgagaagacatggacttcaagtcaagaaggtctatgaccattttttatatgtggaaaagctgaatatataaaatacaccatgggtttgaccagcagatacccaaggaaggcttggctttagaagatacctctttattggagtctgggacatgttctccaaagaacttgacttgtcagaaccaataaattattattctccaaatgaggcagattagattagatctggggctgaatggcatgtgtaggaccatacagggttagatgtagctagactcagctaccatgaagacctttaggacagtgcatagaagaaatctagcatggcaataaataattctcagactgtgacattactgacagccaagccacatgtgatcagcatgcaattttgttcttctaagtatgcttccatgatttctgttggtcaagagtttaaaatgtaataatcactatgggatgattatatgattatatatatatatatgtgtgtgtgtgtatgtgtgtgtatccgttttatagccagaaaatctatcaccaattagaagtcctttgtttctgatctcatgatcaatcagttgcagactgtccaatgttgccaatgagaattcctgagaagactttccctctgcacagtaataaaccacttccgtgctttctaatatgtcaatgcccttcccaacttgtccttgcatgctgctggaagcactaggtcactgtgtcacaatgcagtgtcaaaatgtcacattcatattggatgggtgatgacagcacggatgcaagccaataggtgcagcaacaaatggatgtcttcatcacacagcgtatagatggtgttgtagtctaatttagcagtcttaaaaggtgcttttgagtaccatacaaagtaaaaactaaaagaaccttatccttgcagctgagtagtttgtcatctattttctggtctcaggtttctatcatgatctcatagttgatttatcatttaaaaccttgaaaaatagccgggcattggtggtgcatgcctttaataccagcactcgggaggcagaggcaggcggatctctgtgagttcgaggccaccctggtctccagagtgagtgcccggataggctccaaagctatacagagaaaccctgtctcgaaaaaaccaaaaaaaaaaaaaaaaaaaaaaaccttgaaaaataaaatagtgctttcccccctttggctttatgcaggatttctctgcagcatagccctggcttttctgggactctccatgtagactaagcaggccttgaactcagaaatccacatatctttgcctccctgagtgcacggattaaaggcatgtgccaccaccacttggctataatagtatcttttaataaagtattttcattttcatttatgtgctatgtgtctgtgtgattgtatgccatgtgtgtacaggggcccagggaggtcagaagaggacatcaggtcacctttaccacagcaacctctgagtcctggtaccagctttctgtgttagttactttccacacatgacaaaaacagtaaaaaggggctggagggatactcagaaggtacatgcaattatcgctcttctagaggatccgggttcagttgctagaaccccagcaagtgcttcacaattgcttgtaacttggattctcacagcctcttctggctatattagccacctgtatgcaggtggtgtacatagaagtcactcaggcataggcacacacacacacacacacacacacacacacacacacacacacacacacacacactcacactcacacatacacacacacactggttttgtttcgtttaaacaaagagtttgttttgacttacagtttacatggtagcaaaggcatagctgtaggagtgtgagacagttgctcaccttgcaccggcagtccggaagcaaagtgaagaatcctggtgctcaccttctttctagtgtttattcattccaggaacccagtccctggaatcatgccaaacacagttagggtgaattctgatatcttagttaacccagtctagaaactccctcacagatatgcccaagtatttgtcaccagggattctagatccagtcaagttgacaagtattggccatcacgccatgtttcaccagcagctaggcgctgcctgttgattgtatggttgcccctgtgattggtgcagttgcataggaggtacagtaagccagctcttgtaggttggtgtgagttcacttcatgatagtctcacagtgaaaaacattcctcacttcctcatgacatgtttctcagaatgtagtcattgttagtgatgcgtaacagaacacaggacgatatattcacatatttcatgagtctattgtaaagacagacacaataataattactttggaatgttcctttctagtcttcaaactcaaattgatttttcctgataaagtaggtaataacatacgcaaagagataactgatgtggatacacagatgatttacactctccatcctttgagttttccccacctgcttcatctcactgtcttgctatctcctcaccttgtggcaccctgatctgcacttgctccaccctccatgctattggaagcccctggctgagatgatgatgactgggtcaccattttagatgagagatgctttatcaaggtgtgtgtctagtgtttttgagcaaatgtttctgtgactaacatgagtacacaaaatcatctagcaggcttgttaaaatgtattatctatcacaggtgtacagaagaaggtatgtatttttttattaacatgcctccggttcactttttaatccatgctctaacttgaaaactgacttcccagggcaggggttgcggaaaaggtgtgcctccccaggtaggttctcagtaatggcatcacagacatgagattaggcacagggagatatttgacaattcatacactaggcttggtggcaatgtacagacttctaattacccacacacaacccagttttgaaataacaatttaacactctaggaccacctttgtcagaaggactgagcccccagattagtcattattaatgatgtgacatttttctctcccatggatatgtagaaacaaaaacatgttgaaacaattgcccttgggatttacaatgctattgaaagcaaacaggaggaagacaaggagaagataatgacacgatatatttaacttatttcattttattttattttttacagattttttatttgaattagaaacaagattgttttacatgacaatcccagttccctctccctcccgtcctcccctgccaaccccccccccccccccactaaaaccctacctatcacatatcctttctgctccccctggatggtgaggcctgccgtagggggggggtcatcagagtctattgtatcctttgggatagggtctaggcccacccctgtgtgtcttggctcagggagtattcctctatgtgaaatgggctcccaaagtccacacctatgctagggataaggactgaactaccacaggcggtcccatagatttccaaggtttcctcactgaaagccatgttcctggggtctagatcagtcccatgctggtatcccagatatcagtctggggagcaagagttccctgatgttcaggtcagctgtttctgtgggtttccttctctgcaactggattccagttcagttcagtgactagttgtgggtgtctgcttctacttccactagttgctggatgaggggtatcgggtggcatataagtcagtcatcaatctcattatcagggagggcatttaaggtagcttctcctctgttgcttagattgttagctggtgccagctttgtagatctccagacatttccctagtgcctgatttctctgtaaacctaaaatgtctccctctgttatggcatctccattcttgttatcttctattcttcccctgactcagcctttctaagcatttaaaaatctatttgtaagagcccagatagctcagtaggcacaacatcaaacttttaaaaatgtatttgtatatagtaatatataaaataataagttgcatatataactgaaataaatgataattactataagtgatcatattcaatattattattttgaggagttaaaaaattctaacttcctaaactgctgcttttagtaactatgtaaatccaccagtccaatcagaaagcactcagatacccattctgtcacctcactgtatcaatcacatcatcctaccaacaccactgtttactcaggctgtacccagcacacacctacacatgagatgaataggaaggaaatcttagtccactgaaaagcaaaactcagcaactctggtttagggatttgcttggtagaatcccttctggaatgaagtgcatccaaaagcatggtccccaacatccagaaatctgtcattccctctgtgagtggtgtacttgtaagtatcaagcctgtgtcacagtttcacagacgtctctctcagtcaccttaaccactctatcctcaccttctgttatccctgaccccacaaatctgctgaccttctaatcccatcttgacatctgatgtctactccttgacagacccaaactttcacattataagtcaaggaaagcactaattgtgttatgttctgtccaccccaccaaacacaaacacacgcacacatacatgtccaagacacacaaacatgcatacatgtccaagacacacacaaacatgcatacatgtccaacacacacacaaacatgcatacatgtccaacatacacacaaacacagatatatgcccacgacatacacacaaacacacataaatatctaagacatacatgtccaagacacacatacactatcctaggttgctttgattttcttcgcccggtcctcccctttttagacataaggatttctcccttctgagcctcattctcataggatgatgatgactgctaagttatcttttaggtaatatgtagtctcttgacattttgattatatgttgcaatttttgttaatataatgcttgtaacagtaaagagttgaagaactcttggtgatctttaaggataacatccaaccttgtggaattttagtgcatagttgggaaggtattttggcctcagaggttcctcatcccatgaaagtatcggtctgcagagttacttctctctgtgtgagcatcctttgcctctttgcctttccattagtgccttcactgcaacaacaagtgctggggacacgtccatccccaagtggcctttataaagccacttcctgccatatgaacgaagaaagtcactttaagtgtggtatcagctttgagctctgtgaatttatgatttagatgatgttagtcctacttagtgctgccatttagtgtaagtagggtgtgcccctctggcatccttcaagaacatataagagaggaaacctagaaaggcagagaaaactccaggaacaactacaaagtgacacagtggctgctacacggttatcctctgtttctaagctaacctgggaaattggctggtttttgaaactaggaactacttcaaaatggccctgaaggatgagccatatagtatttaccatctgtggcagataaaagagtcctttccaatttttatcagaatattcaagatagttcagcaggaattagtgttatttgatgggtattgagatgatcattaaaaatattgatgtgtcaaaatttcaagttgagcttaattgtctctccacgtagcttcaattaatttatttactcactgttgaatttattaaatttggaaactttacaactcacttcaaatgattagtaatgatatcaattgctagggaaataaagaatgatgtggaagaggcctttcctgcattagccaggaattaattaaatgaaatgtaaggaaggaatgaccttctttagcaatgctggttgagggggtatccatttaaggtcttcatatggcaacataaagaatggcaatataagcagtacacagaaaagttaataaataagtgctcacatatcattccattttaagaactggagttgcaaatcaactatacgagctaatggtggactttatcactggtgagattatatattcacctacggaacgtaattcacccaacttttctccttctttgcatgtgaattaactcagatgcctcaggcacagtgatgagtcagatgatggatataatggcttgctgttgctaaaagaaaaagtcccaggttgttggttatttgagtcccattaaagcccagagccaccctatctttttgatattggccagatgtcacatgctcacaatctccagggcagtttgcccacatcccagtcagtagggtaagctgcactgtgcttcctaggtgaggtgggggccttctctccttgttgttgcaattggtaaggggctagatcaactctcccatctgctgcagggggtgaagagtgcagaaggggcatctttcccttggcctcacagccacatgacagacaagatggtggggggcagaataagcctacccactctcagggacagtctgcccataccctgccaatggagtcaacaccgtcatactgctcaggtggggttcaggacccacttgctctctctctgtagccagtgaggagctgatccaactcagttcagccctatcttcttggtctttagtggtaacaggagccaaggatatcaatatagatcaaggctgtagcagggccataggtatagacatgacccttggcctcagctcaggcctgaacagcaccatagtcccaggtggcaagtaggccactcacctcattccagacgtctggactggcaaggtgattctgctgagacagcaagatggtgccagatggcactgtgagggctcgtgggtgaattcttcctgtctcaagtctggggacctggggcagagctgtgttgatcctgcggagcctaccaagcctagaaacaccaagtgtttcatcaactttttatctttaaaaaccatctgatatattttgtaactctccctttgaagactgtttcctagagctgggattataatcttcacttctcaatgtcaagggccaagcatgtaggcacataataagtgatcaaaaaggttttgttgacaggaacttggtaaatgatatgtttggctttatagagtggattattgcagtgaatgcatgcctactttaggaatactagctagcgatgtaggaaaattctctccatgccagtgaagaatgaagcacacagcaaagttaacttctggtgtgcccaactgatgagtgttcactatatgttatgtatcatgctaaatgtttgtggttgactattttgcttcatccacatacctaccctacaggatattgttattaactttagcttacaaataaggatattgagatatggtaatatttttgctattgtttgatacttgctcaacatcaaactaagtgaagtcaaacagtaagtctggcattgtgtcagaaattcttaaccacaatcatctattgtatcttataaatcattgtttcatttgtacacaaagaagtgggttaagtgggtttcatggggacagtttcaaatgtatatcattgtactctgttcttactcatcttgccctcttccatgtgcctcttctcctcttgctgattctctttcttatgaaagagttctctcttcattcatgacaaacatagtcaatcatcccctcttgttccttctctccatttagactttttcttcctctcttatagtctcctttttattttcacatcctataaacacatacagatacatatgtacacatgtatataaacacacttacatatacacacatgtagacaaacatatatacatacacatgtatgtagatgaacacacaaacatatatgcacacatttgtagatgtaaacacacatataaatatgcttatataaatatatataaatgtacatgtgcagacatatgtacataaacatatatagatgtatgtttatgcacgcttacataagcatgcctacatacatacttgaatacaaatgtatataagcatacaatatagatacatgcatatacacatgtatgtaagcatacatatgcacaaatgcatatacacatgaatataacatacatatgcattaaatctaatttccatatataaaagaaaaatgtgatatgaaactttttgactctggcttatctccttaatataataatccctagttccatccactttcctgcatgcaacataattttattattctttactgaaattccattgtgtgtatgtacattttctttatctattcatctattgatagatacctaggcagcttctaaacttagaatctgtggtagtttgaatgagatgtccccataagtcttgagcatttgaatcttggtcccccatgagtggctgggatgattaagaggtgtggtctcgttgaagggcatatattaatagtggcagactttgagatctcaaaagactcataacttgaggtatctctctccactttctgtgagatttcagctgttcctgccaccatgctcctgcttggtcatcaaggaccctaaccctctagacacataagcctaaaataaacccttccttctataatttgccttagtcatggtgttttattatagcaatagaagagtaaataaagcagtatctttcagagtaatccctggagaggtgtgattggatcatatggtgcctgtatttcatatttttttctttacattgttagagactgattgattgaccgatgtatctatttcatgtagtcttaactcagtctaactttccagggttagggtgatcttgaactccggagcctctggtttctacctctggaatgatgggattacaggcataccactcccactcccatggtttagccagttttagggacttaaccccaggactttaaactaataggcaagtactataccaattgagtcacattcctagcccttattttcaatttttggagcaaccaccattctgacttgcttaatcaattaccccagtttatactcacactagcaatgaatagtcattcctcattttcccacatcctcttaagcatttgtttctacattctgttttttatttgttttgttctttgaacacattcttactgaggtgagatagaatctcaaagcaggtgtaatttatatttccctgatagctgaggatgctggacactttcagatatttactggatattttcaagtcttcctttaaaactatgcaattcattgttccatgtattgactaaatagtttggggtttatatatttaatttgaggaatcttagattagagaattctcaataatatattgcaaattaattcaagagtatattaaggccatataccatgaccaagttgctatcattctagaggtcaaagattttgaatatatgcaaattaatagatgtaatacagtgcacctacagacttaaggatagaaatcacatgaacacttcaatataggaaaaaagagactttgataaagttcatcatctcttcatgaacaaagttctgaataaactagaactataaggggcatatctcaaattacagccacacaaaacaggcctatagcttcggatggtgatggtcaccacaacaggcctatagactcagatggtgatggtcacacacaaatagactcaatggtgaccacacacaacaaacctatagccaatattatattaagtggaaaaactgaaagcattttatataaaatcaagaatggaaggagggttccccctctctccacacaaagctatttcttgaggtattagctacagcagtaaagagcaggaaatggaggttagatagataagaatggaagaaggcaaaccaaggctatcttcagacaacatgaccttgaattgaacggactctaatgaatacactagaaaattgctgtatctgttacaaaaataattttagtgaaatagtaggatacaaaatcaacataaaaatatcagtacttttagtatacacacacacaattaacttactgatacaagaatcaggaaaaatgtttgaattaaaagtgtccaaaatataataattataaagaaatatagaaataataaagctaatcaagaaggtgaaagaccattgcaatgaaaactttaagacataatagaaatataaaattccagaacattagaaagatctactgactcttaaactcaccagatatatattctggacaaaacaaatgagaaatgattaagtattttttctaattctctgtctagttttcccaaccatctttctcgggaatgtcaaagctgaaaaggaaggtcatgatttggatgaaaattttccccacaaactcacataaggttgaacatttggtcctcatttggtgtcactgtttggaggggtttttgaaaccttttgggattgaggcatagcttcaggaattggattgttaggtggtccttgggttttaagtgtaccctatttcctttcctgcttacttccccattccaaatgtgagcaatttcctgcttccacgtctcccaggggctcctaacacaatcccttccctgccatggtggactatatacccttaaactaactattcaaataaatcctttctccattatgttgccacaatgacaaagatacctatcatggggagagcttttgttctcaaagtgtctttagtctttggagtcaaagattcagtattctgaggactctgtcataggtttagccaaaagacacagaggaaatatttaaggacaaccagtttacccatgtaggacctgtctgtgtttagaggaattgagaaatgctcttggatgatgggaaggaatttactaggtatacaggacttggaagacataggtagaagaataaccactggaaagatatagagaggagaaattccaaggcttatttgttgtgggatatttgtacaatgtgtgaagatacatctttgctaaggtgccttctaattggtttaattaagagttggatggacaataattaggcaggaagaggttaggcaggactttagggacagagaggactctgggaaaaagaaaagcagagtggccagccaaatacaaaggaagaaacataggtagtatggacagacgaggtaatgagccacacaacagaatgttgattaaaataaatgggttgatttaagttatgagagctagtgggacaagcctaagctaaggccaagctttcataattaatagtgagtaagtctccatgtcattatttgtgagctggtagcctaccaaaaaaatccttttacgcttattgcttgaggaaactgtaaataataaagccaaactagagaaaacaagcaaaaaagggttagcaatgtatcaaaagcatctcattgtatggaggctgacatatggtgcttatggtgttcaagtgtgaaagctgtgccacgggtcaagcctatcagcctacccctgtggtttgagcagcccactgtaaaggctagctcaggcaactgtcaaaagtgttctgcctggactcagcgccctttcacagacacttcactttcaagatttttacatttattctataaagaaactttacttaattgaaccagtagttcaatgttgaccaactaaaagggaataaaagaaccaccagctttatgttgacagtcaagatgatagatgctgcccttctttttgactaatttgccaggcatgattgatttaataataggtaggtttcattttaatactagtgacaattgggggaagagttggcaaggggaataaaagagtggtactctatagcaggtatttaacgaagacagcctaaaaatcaatattaatccttcactggcagctgaacatttcagtcaacctaagcagacgaatgggccataatgtcagtcagaagtattagtctactccttggctgactcctgctctaaatgagaactgttgattaaaaatccatccagggatgccactgcacatgttaaatagctctcattctccccaggagccagaaaatgtttctccttttgcctttttggtttttttctttaatcttctgtgtcctagaagatctgtgctatacctgcagacagaattcttgaaggccttctccaacccaagggctatccctcaactatagaatatgctagtggcttcctggaagccccctccctaccccaacacacacacagcgtgcagtagtggcaagctgaatataatccagcacaatgcttactacaaagtgaagttatgaagaacaaagcaaactttaggcatggccctaaggccagatttcttgtctgtgagtgttgccagagaactgtttaaaataaaaataaaagagttctttcataaaatttatctgagggtcatgactttaatgagttagcctgtctgtttgggggtctactgaaataggtcttatgtttgtcttgaatgatctagagcaagggaatgactaatagactttagctgggcgttggtggcacacgcctttaatcccagcacttgggaggcagaggcaggcagatctctgtgagtttgaggccagcctggtctccagagcgagtgccaggataggctccaaagctatacagagaaaccctgtctcgaaaaacaaaacaaaacaaaaataataataaataaataaaaaataaataaataaaatagattttaatccagccaatctctcttgaaatgcaagacccttctggtagattttatctctcaatttgccaccacttaggagaaagcccttttataagaaagtgagggaagcaaatctttacattagagtcccacatgaaactttctgatgttaaaattaaatgagataatttagattttccgaagtctgactctaggaagcagagcaggctcatacttcatatccaagcaaaactaggttctacatttctccgagtacattacactgaagaaggtatgcacattttaattaggaaagcttgttgaactggaagttcagaactgactggaggtttgatttctgacaaagagcctataaaatggagctattaataccaggttcagaaagaatgtaaagagaactaaactttctcctggtttttactgtaatgaaagttcaacaatgagtgtgatgcctcattgtcttgattgacattcaaccagattaggattgttgttgcagacaataaggtcattaaaactccaacagttaccataaccagtgagtgatggattgagaaggtttcagatggcctctactctgaagtagagacactttctatacttttcaaggcaatatactatgataaaaaattagaataatgacaaagtttaaatataacaatcagccttccttgatgtctctcttcctttcataccttactttcaattttttttgttatgtctacatatttatatatagaatccaatcacatttcctctcacttgctaatacactgctgaaagccatcaatgttcttttctggatcttatggtatccttttaactggtctccctgtgtgtgcccctgggctctgctgtctagccttgacactgaagcttgcatgaaccttttaaaatgtcagatcaaatcaatcttctactccaaattatccagtgacttcctatttcactcaaagtgaaagacaattaacgatcaccaaaaatggtagagcagggaactccagagctccatacccccaagaagcagctaataatctgcaaaaactgtcagaatcaacttaagcagaactttgcaatccagtcaaacacacaatgaaggatagtttcattgccttaaaaatcccccatgttctgcctactcattcctctctcccgacatcccattctctacccataaccacttagagtcagtagtccttttaagtctttgaagtgttagctattcctggatgtcatgtaagatgttctatatcgcaaagcctttttgactcaaatgcttttacttactgaaggttctcatgtctcttcgtgctgaataattcactaatttttagaagtaaatactatttctttgtgtagctgtgccacactttatctacttaacaatgaaggacatcttatttgcgaccaaattttagcaattattaatttggctataacaattctatatgcaggcttttgtgttgccatcagtttgtttttaactcttttggttaactataaggaacatgtttgtggttcttattgtaagaaaatgtgtaggtctgcaagaaacttgttaactaattataaatgactgctattttgtattaccaccagcaatgaatgatacccctcctacacattttcttaagtttatctgtctggcttctttggccaagttaatgttcaaatatttggtcgatattttggttggattgttcacttgctatatgcttcagttttgagctgtctttgcatattctggataacagtactttgactaatcatcttttgacattgcctttcacagagcaattttgtgtgttttgttatgataaatctttccgccaaaagccaccgagccccaccaccatgtgtgtgctttccgccagccaagttagggcccaaattaatgcacagagagacttgtattaggtttaaatgctgcttggccaatgactaggattcctatctgttagctcagtcttaattatcataaacctatatattttataagacttatcttatagaggatgccttccattggcaccctctcttgccagtgcctcacatggcgccactggagcaggggaaggggaaagaggacacttcctatttctccttggtctccttgctatgtcacttctgccctggatcaccacttctctactacatttcccagaatcctctttgactcctcatcctgtctaactttctgccattggccaaacagtattttattcaacaatcaataagataaacatacacagaagtactttccccatcagtgtttcatggctcatgcctgcctacttgttatgtctaatatataaccatgaaacccaaaacatctaggtttctttccctagctaaacttctgagagttttatagtttcacctttgacctttaggttatgatccctcctaaagtatgtattgaagagtgtaaattgtatgtccttattcattcctctatatgttatttgtcaggtgacctggcatactttcttaagaagacttttgtcttcattagattaccatttcaaaatatttccaggagtctatttttaaacttgtatatatttttgctgagttatttcttattattctttcccagataccccacttccattaccacagcttgccaggaagtcataaactcaaacagactccattctccacttaattcaacttgaacactgactttaatcctgtatcttcagttaaggtagcatacaagagacatccatcatacaatagtcattcttgaaaattcctctttcttctctccacatactcattcatcccaagttcaatgatcttgacagagaatatttcttcaacaagtacaattccttaatctccattaatttatattagaattagtatcagcgattatagttttctaataatatctcttcagctctttttgtccctttcaagtcatctgttacactaatgggtcagggataactctcaaaatctgtatccacttatcttgttaatgtttgtaattgctcaagtatgtatgtaagcacaatcatgaacatctacccacagatgtctctctgacctcattagtaccatcttcctctttttcttagcttttctatgtggcataccctttcctctctggatgtgccatctctccagacaccactagcacttacacatacatattttgctactgtcaacccttagctcttagctcaaacttccacttttttgaaagtgcccatccctatccatctgactagtaaatcttataatctataacagggtacatgaccacagcagcttttacccatcttctgtgctattcatctgtgatggtttctttatgtatgttataatttgttcttgcataattatttgagtatactgagtactatctttttttgtgtgtttgttttggtttgtctttgagacaaggtctctagtccagcctggtttcaaattagatacataactgaaatgactttgaatttctaattttcctgcttccatctcccacattctaccattataggcatgcactatcacttattttatgcagtgctgaagaatgaatccacgccttcttacataccagacaagcactctacattcccaaccctgaatagtgtcttttttttctcattttatcctaaaggttctatgagagtaggaaacattttgatttgcttattattattattactattattattatacccactattatcaagcctactgatagtcacttgttcttgtgcagactcacaatagctttgggaaagaagttcaagcatatggaaacaaagggcagcacaatcctaaaagaatatgtccctgaacaaatagtttagaattccgtatacaatttgtaccatacattaagtggagagtgaaaaacccttaaaggcatcagtcaacttatcaagtatatagctgactctgactctcgatgagatctatgtgaataactctacacctatgactggagggctggagttgctaacacaccccctgtgctgtataggctcatttcataacctaggaaggtgggtgggtcagagacttctcaagtgtcatgagtcattgaatcatccccatactactgggagaggcatgacagaacacctaattacaagtctgaacccactgagtcaaatgaaggcaattacccagagttttagaagaacagactattaatgccccactttctttccttgtctatttaaggcaattatttttctttagtctgaacatagatcaattgcctaatgtgtgatccattctgcatattaacagatgttataagaaacaaaagctttccttggaaaatgctgtagtcaatacagctactgcaggcctattgaattcatatagacccctatcctttgaggatggaatacaacattgcaccaaatgtttttaaccatgaaaatcttgcttggctttcttgtttggcttgagcatctttcttgactgatgcttcatggaactgattttggtaaatggtaatctatagtttactcctccttgcttttcatgtagctaactcaggggatctagcagttgctggtacatgtagctatagtcatttaaaagaaggggtatgatcccaaaacagagttgctgagtgacactgtagtttgtgtctttatacaatatcataaagtacatctgtgaaaactcagatatgtcctctctcatgttctcaagaaatgaaataccataaaatacatgaaacagcagctggaatagccagtatactgccttacagttaaagttttccttataagtacaaaatcacacacaaaatcatgatgaggcagggtggtggtggcacacacctttaatcccagcactcaggaggcagaggcagttggatctctgtgagttccagaccagcctgggctaaaggtagctccaggatagtctccaaagccacagagaaatcctgtctcgaaaaaccaaaaaaattaaaaataaaaataaaatcatgatgcagaggcaggtgggtctctgtgagtttgaggccagcctggtctccagagtgagtgccaggataggctccaaagctacacagagaaaccctgtgtcaaaaaactaaaaataaataaataaatgaataaaatcatgatgaaaactatagtataataaatgtataaacaatgtcagagttgcttattaccgagtattatgctctatactttatgtacatactccattggaacaaagggatttgagttataacaacatcattgaattgatgagtagtttcactgtgacattaaaatggatatgacattagtaggtgactgtaagtttctgtcttctttagagtctggggtctgctgctgaatgtgtgtccaacatggatgaaaatggtattctataactcatgaccataattgttgaaaattgtgtagagcaaaggaaaaccaagacatcttgggatcaacctatctagcaatagtttagagttagacgctagaccagtaagtactacagaattaacacaggttcgccttgcagtgtactttccagtctctgaaaaaaaaaaaaaaaaaaaagccctgacaagctgctcttatgtatttacttttaacgagcctgaaattccacatggctttgagtgtaatatgagatttctgtttaatataacatctgaaaatattacacagaaactcatcaggctaccaactttttcaaaatccatttaaagaatagtcaccctttctagtgttgcaagaaatggagagaagagataatacatctgtcttcatgggctttattacctctcttttattacctatgggatggtaccatctagattcaaaatggttcttttcccattaggcaacccagtcaggaaactcccttagagatacacccagaggtagggttactaattccctgagtgcttatcaaaccaaatgaattgatcatcaagattaaccatcatacatgctatttaattatgaagacatcttaattggctttgcatttaatttgactactttaaaatggtagcagcattaagtgagctaatggtaaaatgtatagtttgtttttattattaatggcgtgatttgaatataatgtgtgtcatttgtggttcatactctggaagggtaggacactcaaaagaccatttgcagaattctacaaacactatcacacaagaatatgccaatacaaatattcctgtgttgttttcatgttgctcacaagggaaaaaagagtcagcatcatgtgtcttcatcagtcttatggctgtttgtcagacagataagatcttcgccactgtggcaaagtatctcacataaacagcttaaatgaagaaatctgtaccatggctcatggcttcaggaatattggcccatcgtggtaaagagggtgcaacagaacagctcacactccattggccaggaaggtaataaggatggggagggttgagttctataattgtttgcccgaagtctgagcacacaattgtgtactgtgagcttccaaaggcttaggcaatgctgccccttaacagttgcaacctgtatagtttctttctgaatctgactccacttgttgtctgcaaccctccttagaaataccccctaattctagcagcactaacttcctggggtattccactgtctggtttaacctaacactttcatgctttatcctctcaagggctgccatcaaagacaattccacattacatgacttccttagctcacctctaaaatctggatggaaatttccactcagtaactcttattttgaatgcctgcaaagccaacatcatatggatgatgccaggcctgccatcaacttgagcagtagccaggctccttggactttagcttctttggtctctgaatagctgaactgttgagaatgatgaaaagaatccaggggaaataactttctgggagtcagtccattgtgtgggcaggaaggctcagaggtaatatttttttcttaaataatagtttttattgattcttcgaaaacttcatgaatgtatataatgtaccatgatcatatccacccaactcttcccctccaacttcctccagaaccccacagacacatcttactttctacttcatgactactttgtaaacatttttatttatttttttatcccattaagttcaactagtgttgcccgcatgctcatgggtgtggagtcatccactgggtcagggacaacttcccagtgaccaccttccccaaagaaaagtgattcttccaccttcagctactatcaactgccaacagcttcttagctaggtgagggggctttattagcccctcccccatccatgctggaattgtttttaactggtttgaccttgtgtaggtgaccaccagtactgtgagtcatttctgcaatagccgtgccatatccagaagactgtattccacagcacacctctccatcgtagctcaggttcctgccatttcttcttcagttccattccctgaagacagctttattcagatgccctatctactgctgagcacacggtcattgaatttcatcactttgaacaagtgtgaatctctgtattaactgcttctcgctgcaacaagaagcttctttggccaagactaaaaacagcaaaaatctacagatatcaatattcagaaggcagtttgacaagatgatcagaaaaactgggtcttaagaatttcaggttggcctcaaacttggtatataatggagggtaaccttgaactcttggttcttctttctgactttgaacttatgatattcctgcttccacttcccaactgcaaaaattatgggcatatgttattatgctcagtttaggcagtgttggggatcagtctcagggatttgtgaactctaccaactgagttacatacaccatccctcaaggtaaaaatgtttactatttcatacctttgaacctacagtgaggggagttaatcaatttttgagacattctgaagactttccttcctattgtcttggcataaaatactttggctttttttcccaacatctttcctctctttataaccattctttccttagccccaacttcacatggcttttctgaccacattgcaaagttttaggatcgtctctactctttaactcctgattataactggaagcctagctaagaacagttagcaataacaattccataacttgaatgcagaccttccctgaaatgagtgctgccctccccaccccatcacccatcaatcaagaaaattcccttataaatttatctacaggccagactgatggagtcaattcccacatgactcgactttgtgtcaacatgacaaaaaactaaccagcacactaatcaagtagagaataaaggtcaaccatcacaggctatataattgacttttctttccttctctgcctaccttgcatgacaatggccttcaacacttgcaagttagtcttgcttttcactttcaggatatctttaagtacttgggtttccttagcactctaatttaaatacctatgcccaattcagtgagtaagttctgctgttaatggtctacttaatgcctatttgaaaacatcatcgaataaccaggttttccctagccaaatgtgtaacccacatttatcaaagacagaggctgacaactgtccaatgcaatacatgagaagcatagtcaattttgctatctttgaggtagaggagagatcattttgtttggaaggtttcaaatgttttgatgatataggttacacataaatgttcattttgctttttgttaaacttttagtgaagagtattactttaaatcaaataaatgctaccaacagttgataacatataactgttagctctttaaaatattttttcaagcaactttcatatatactttaagggtagctagttgctcatctccaccaacctgcaagagtcaagtaattacagaaatagtttgcaaatgttacaaaaatagtcagatttattcacacaaaattttgagtttctgagatgaaagtataagtaatagatcatacataaaatgtatttggtctaaatgtccaactacatattttaacttctgcatgtaaaacattaactaatgtgtggtacaaaaaagtatagatatgaaaaagtggtttttaatgtgggaagagaatgtagctgaacatataaataaatatataaataaataaataaagtcaaggaacccaatgcttgataaacctgacagcatcgtgcagaaacaaatgaaatagtcacactctatattaaaatggaaagaaatatattttaacaactcacttcttatcctacagatatagtcacaaacctcagaagtaattaaaataaagatttcaaggggagggcaaatacccctgcaaactcagaatgataaaacatacacagcctgacctctgttaccattgaatcaaataagctgttaattacaaaaggatgaacactctctggagataacagcaaactccaggcagtcaataggatgtgataacatccaatacaatcaagaaacatttgagttgaacacaggattatacacaaggattggaggattaagagacatggcatttctgagtctagtaaacagagaatgtaagatgccagctgaggcaggtagagggcaggaaagacagatgtgatgagttaatcacagggaagttgatgaacaaatggctgggctccattccctagactggcaggggctgaaaaagcccagtgacctcccctgcattcttaaccttcaattaccagttgaacataagtgtcaatgttaacaaagattaaaagctctgtaattgctgctggttttttggttaagcagcaaaattttatcacttcatgtctaaataatcaagtagattgtgttcctaaaaagtcctgatactacaatgttactactactcatggaaaaatacattttcaagaaaaatcattttgatggacagaagaacctggcacttacgctatatactcagaaagtattgctgtgtaacaaactatactcacacctggtttagagctattctgactttctaatctcacagcttttgtcaggaatctgaatgcagcttaactgaattcctctggctcaaggtctctcagaaagctacaatcaaggtgttggctgaggcttaatttatctccaggttcaactggtagacaattagtttccatgcctattcacatgttaatggaagcccttgtgagcatatccaggttcaatcctatacctgttctcagggctcaggctctcactggatgttggatggaaaatcagcttcttggcataaggacgtatccactgggctcttcataacatgaaagattatttctggggtggggggggcatggagagaggaagagtggagcagagaatgaaattagtttccaacataacatgaaagcccaggggattttgttttgttttctaatcttagaaggaatacccatcacctctgccctagtcagtatatgcaactggttgattccaaccacactcaaggacaagggattactcaagagtatggcgactatgagataagcatcattggggcaactagaaaggcaggttcccatatcttatcaatattccaggatcaatacaatactttttgtcttgagtaaactaaccatttggttaagtaaagtatacacagtccagaatagaaataagattagtatcttgttcaaatatcccgaacacatttcatttattcctatgctatatctagtaagttgacataccaaattgtagtatcattttactgaaatatctctagtaatgatctccaagagacatttttcttccggtattttatttgactccttgagcatggacatagaacttcttccttgaaatcaccctcatgaaaacactactcaatattcatacatttttcactggtgtatataataaaatatttaaagcctggtagccttatttaaaaagaggtttgtttatatcacagttttggtccttcaagggcaaggcatttcctcaactctggtgaggacttcatggtgggtggggtcacaatggcaggagtgagtattgaagaaggtaatcacatttagaaataagaagtcataaaataacccaatggttttgttgttgttgttgagatagggtctcactatgtagccctggctggcttaggacctcttaccctgtagaccaggatggctttgactcacagcaatctgcctgtttctgccttctgagttctgggaataaaggcatgtgccatcatgcctatcaatctcagggttttctaacaactcaaggatgacataaaaacaaccactgtccaatccaatgggaagtgcctctaatgatccaaacctcctacaagcccactctccaaggtttcaccattcacagtctgagtacatgaatactttcttggaggacactttcctagactgttcaccagctatagtatgattggctgtcatgctccacctaccccactgatattacttctcagtgcttatcatacactcttctacctagtaatcagctcctctattgctgtatttttaagttattcaaggttttccttttatcttttaatctactcattctacatatttatttccacatccttcctcaagtaagggcatatagtattgaaatgtcaactcccttatatactgtgtattcattcactagcacttacttctactttatgactttctagcacaaacttcattctctattctcttttgaatctcaggtaaatacaacagacttacactgttggccgaagtaagagtggaattgacattttagattcttgccctctttccatcatccctttaaaattgtaacaactaatatacaattataaaattataattatgtgtatttatatatatatttcttgaaattttattctccctttcacttttaccacagctactccaattttggaatcttccttttcttccatgatttaacctcctgattggttactgtaaccagttgtaacctcctgattgattactggtgccagtgacagcttctttttggtctttatgtacagtgcacactcctctttagctttgtccatagcatgtctgaagaatttttagatctaagaagcctttgatttggcctcctctacatcttcacctcctgtgcatacaattaaacacacacacacacatacacacacacacacacacacacattcacaaatacagatacaccacacagccacctgaatgccaacctgagacctctctttggtctatccatggcatcctaaacatgtttctccatttcaatgactgttctgtgtcatacttatgggttcatctgtttagcctataagactgaaatagaatctttttttctctaatactaacatctaatttagaagctgatatcaaaaactacatattaaattcacttaatgagatcatgaatgcatgctaaattctcacctttcatcataaaatcgccctaattatcctggaggtatttcccaaggctccaaaagttgcctgacactagaactagtcctcagcactctatatacactgttttactcataaaataaatctattataaagctaattttacaaattagatctagtaagggattaacaaaaacaataatatgaaatagagctgataaaactcacaaagaagtttaaaaaatattcctctctcatttcctcttgttctaacccttccttctctttccctcccttcctcattttccctccctatttgaacacagcactgtgatacaacacaggtattctgggaaccaagaaggctgctatgtgattggcaggtaggtagcaattatagcatatagtgttccatgccagggtaattgccaccctgtcatgataaagcagggcagtgtggtgatccttctcagaagggtacacaatttaaaatatgaggaatgtttatttctagaacttttcgcttaatgtttaaggtctgtgtttgagcacagataaatgaacatgcctagcaaaactgtgggtggtggggaagctactgtgaataatataaattcagatcaataagattaatttttatgagagccctctattttcataggcaagggaggggtaggatttctgataagtatgacatcagctgtctcccactcccacccagtaagaagcaaatacttagctgaaactgaaagctgcattctgcttttgattagtaaggctatcttactaattcagattcactcagattcaccagctggccttcaatctcagctccctgtgaatttcttggagattctagacatgcagctgctgtgttctggttagtcacgttcacatcatttgccctcatttggtgtagaaatttttctatctgtgcccaaccctgctctgttcttggggccagtggtggagagaagccaacagagactgtagcttgcctttggagaaacaatcagctttgacaggcattcaagaaaaataaataaataaaaggttgacagctctaaggataaactaacttcactcaacccagtgcaagtcccaagttcccattgttgtgatagtggaagttgccaagccttaccacagcaggattggctgtaattcagtcgggtgattcacagggcaatagtaatgcaccatgaagtgttttatctttttttattacttcagatcacaattccttatagacactatctcagcacttcctcaaacacacctgcattgtgaaggaaggactgtaactgttcttacaagtaggtacttgagtcagcctcaccacctcaagcaggacacacctagtttgtactagcaaaagaatacattctggtttaattgtggggttccaatatcttttttctccctggagtggagcacctcagttaccctttcatttgtcattaataactccattatatcattatgatggcttaggagcccaaattcacctctctgtgtgtacaggggagtgtgagtatattattaaagttcacatgacaatctaaacctatctctgtaaatgtaaccaactagaaattcctttgattcttctacttcttttttttttttcttcttctgacttcaccagagagccctgagtatccaccctctctaaacttctccagctcctagaactacttgtcatcatcttcgatgacacttctctttggctagaaatgaattaggctctgttttgaaggcttcgtagattaaatgttcctacttcaaccttaggcaatgctgcaacaaaagcagtttccacacaatcccctgcctggttggacacatcctcgctcttacttgtccaacagttcttggggcagcattattctcccctgttgtttggcccttcattcaccattaggaactttcctttacaaaaaatatcaaaatacatcaatgctttaacaaaagtcagatgtgagctaaaggatcggagaacccttacttttatgtttgatcatccgttatcagagaaaggaaaaatttttaactaagatgttttgcctctcctattacagcattccacattagtagaaataccagtctactgacagaaagctaaccttctccaaccttcaacttgagttgacaaagtgctttaatctcctcatacaactttattcattgggttcaatttccccatttccattatcaaaaccatcattgagaatgtaagtcaagctaatttagtcacacccacttctgatttattcaaggtatcagaattcatggattctattcaaaagtgtgcaataagaatatgctttgtgatttgatgataaaacctggccttggtgaaaattaaaaggcttactcattctcataccttattgtttgggttttaaatgtgaaaactatatatatatttttttttttttggtttttttgagacagggtttctctgtgtagctttggagcctatcctggcactcattctggagaccaggctggcctttaactcacatagatctgcctgcctctgcctcccaagtgttgggattaaaggcatgtgccaccaacgcccagagaaaactagatcttatatgccagtttgcttcctataagaaaagctatccaaggctcagcagttaagagtgtgcactgttctgtcagaggaccagagttcagttcctagcattcctataggccagctcactactgcctataactccagtcccaaggtcctcttctgatctccttgtgcaactgcatccacaggcacatactcacgcaggcatgcatttgtgcacagaattaagaatacatgttgaaccttaaaaaaaaaaaagaaaagaaaacctatccaagaatcaaggcaatgccagggaatgccaagtggtgtgaaggaaaggtctttatgcaaatgtcaatcacagaacaaagccaaacttgagtttgtgcttcccaatttatgatttcctacatggatacagcttcaaccaggctcacacttctttcttcttcaagaatcttgaattatatacataagtaagattaggaaaaaaacatatgctttaagaattttgtataccactgggtcgtgatggtgcatgccttttaatcacagcactctggaggcagagacagggagatctctgagttatgaattccaggacagtctggtctacaagagagttccagccagggctacacagagaaacaatgtcttgaaaagaaaaaaagaaagaaagaaaagtatagctctaagaactaacatgaataaaacaatgtaagtggctctgttgttccacaaacaaagtgtaatggttaatattaacttgacaaggtctagaatctctgaagacactagcttctaagtgtgtctctgagggcttacctacattacattaataaatatgggaagacgttccccaaatatagagaggaaagggcttatttggcttacctgtcctaagtcacagtcctttataaaaagacattagggcaggaatgtaaggcaagaacttggaggtagtaaatgaagtagactatagagagatgatacttactggcttctttatcctggttcactagcctgcttttatatacacccaggatcacctactcagtgatggcaattcccacagtgaaccgggcactcccacatcaattctcaatcaagaaatgcctcacagacttgcctgcaggctgatttgatgcaagcatcttcctgattgaggtttctctttccctcttcttgtatcagggtggcaaaaaaaaattctaagcagtacaacttacatctatatcatggtatttactttctaatgctcaatattaactctaaggagaagaatattaatgtgcactgaaaaccatcaacatacacaaacacacacatacatacatatatatgcatataatatatattatatacatatatatgtatatatgtaaacaccttttatgtttaagaggctgttattcccctataatgagactgatgactactttttatgccatcctagagccctcatccagtggctgatggaagcagaggcagacacccacagatatacactgaactgaactctggaacttagttgcagagagggaggaatgaaggccaaagcggttggtaccaggctggtgaaacccacagaaacatctggcctgtacaagggggagcacatggaccccagactactgtctgggaggccaacacatgacttatccagacccctgaatgtggatgtcaattaggaggcctcctcactctagggggcccctggtagtggattagtatttttccctggtgtaagaagggactttgagagcccatcccatgtgaagggatgcactctcggcctggacacattggggagggcctaggccaggcccaggatgatgtggtggactttggggagctccccatggaaggccctatcctgcctgaggagtagaggaggggtaggggaggagagggagagggagaagggattgacatgtgaagcaagcttgttcctaatttgagctaataaaaattaaaaaaaaaaacaggctgttataacttaaggtaaatttaaagacacacattttagaataataggcaagatttggagttcatttgggtttgttgtctcttttgttttatttcatttcaagttttcagttagttgtctttaaaatttacaaagccctccaaagtcatttaaaataatctgtagaatgaatacttgtgctatatttcctaaggaagagccagagcttaagagcacatagataatctatctctagccacatgttgaagtctcactggctcaaaatgtaatagattcactctaattattcaaggaactcattttacatccttgcaaaaaccaaaattctgtttttttctgatttcttatcaattaagaaacaaactatgatctcatcatactttcttaaaaacacaaaaataaaaaacccaaagaacttgaataaacaacatgagagaaagaatagtgtaatgggttttgccagttgacattcacctgaattcacctactgtttttatccaaacattcactgcaacaaacatattgatctaaatacaaccagcttgtatttgtgtgtgtatgtgtgtatgtaagctcataactgcatacccccaaaggtttgtacaaatcaaaggataactgtgtggttctttgggcaccactaaccttatttattgatgtatttacttgttattcatttattttgaaatagtcttttactggcatggaacttgtcaagtaagttagtctggctggccagtgacccacagtattctgtttatctctgcttatctaattgtgattggaagtgtatactaccaggtctggcagttttaaacataggttctggggattgaattcaggtgctcatacctgcataagtactttacccactgagttaaaagtcctaactcccaatcagctatttcatttttcattttttaaatttaaattataaacaagcttgttttacatatcaatcccagttccctctacctcctcctctcccctgccccccaccagccgccccatcccatcccctttctgctccccagggagggtgaggccttccatgggggaatcttcaaaatatgtagtatcatttggagcagggcctaggcccacccctgtgtgtctagactgagagagtaaccctctaagtggagtgggctcccaaagtccattcctgtactagggataaatactggtccactaccagaggccccatagactgcccagacctccaaactgacatccatattcaggggatctggaacagtcttatgctggtttcccagctatcagtctgggatccatgagctcccgtttgttcaggtcagctgtttctgtgggtttctccagattttgctcatcactcctccctctctgcaactggattccaggagttcatgtcagtgtttatctgtgggtgtctgcttctgcttccatcagctacgggatgaagtatctaggatggcatttaaggtagtcatcaatctcatcagagaagggcatttaaggtagcctctgtactattgcttagattgttagttgggggtcctccttgtagatctctggacatttgcctagtgtcagatttctctttaaacctataatggatccctctattatggtatctctttttttgctctccttttcttcccctgactcaatcttcctgctccctcatgtcctcctctcccctctgctttttcttaataagcacattcatgaccggatagaactgcactacttaaagaattctacaactcccgctcttaagcctcccaacccccatgagaaagaacaagtaacctaaggcatgtatttaaacttgcacttaactgaaagtaagcaaaatttaactagtacaaacttattttcaaataaacaggtggaacttaatttaatttataattttattcttcaaaaaataatttataaagaactatattaatacaatatatatatttacatgaacaagtatataatgaacttacaaaataatgctcccaatatagtctgttaattatatataaaagtatgtttattggtaaaacaatatattgctatacacatacattattttacacaaaccaatttactaaagcataggatatttatgtatatatatactgtaccacaagcagtagtttataatagtatcatttttttctcactaatctaacattcactatcttcctaatgttaaaattttaagaaaaactcaaaattaagtagctcaagatagcagaaaacaactttatctttttcttatttagagaaataaactgaaggagacttcaaagagaatgaaagtgacatctagaggtgtggttgggatgcaaggaaagttaagacattttacgcagagatgagattagaggcaggtgcttgtaccttgggcctcttgtaacacggcagcagagggaaatggaaaaaatgaaacagcataaaggaagaaagatcagatgcaaacagagcacagaagacagggaggtgttgggacattgccttggaaccctgaggaactgaagaaaagtacaattaacacacaggaaatctgtgatcaaatatcagtttcaggggatggggagaagaaacattcagttctggcctccacatctatatgaagtaggtatggttatcactataactttaccaattgaggaattttggcagaaggcttttagtcatttgcccagggtcataaagatagtagatgatgaggatagaataggaacccaggcagcctttgttttgttttgctttgttgtgaaagaggcccagcatggtcctatcattcaagatcctcctgtctgaatttcccaagggcagagattacaagcacatgccactatgccttggatctacttcctttgacacacacctgctcttggttcttgccagaggctgtaggtgatcagtgtactttagtcattatagtccagaacaaagattttaagaaacctagagaccttgtggactgtgttactgagtccctggttcctagcttagaaccctggatcactgtctgctacaagctgggtaccaaatctagtttcaagcagtcattcattgcatttccttgaatttctttttcatttaaaattcgggattttttgaagggcattgtggggcacgcctttaatcccagtatttgggaggcagaggtaggcagatctctgagttcaaggccagcctggtgagttccaggatggccaagagcgttacacagagaaaccctttcttgaaaacaaaaacaaaacaacaacaaaaaacaaaactcaggattttcttggagttgaaactcagatggctaaataaccatgtttttctttttgttttgttttgtttcgagacagggtttttctgtgtagctttggagcctatcctggcactcattctggagaccaggctggccttgaactcacagagatctgcctgcctctgcctcccgagtgctgggattaaagatgagtgccaccaacatccggcatagccattttttaacaccaaggagagagctatatggattaacaattccagaagaaagaagcaggggaggggcctcctagaagcatttgaaattggagtcatctttgaggtccagctgcatgtttaccaggcccacggtttggttagcaaaataatagtcttcctgcctaatgtgttgcaaagttaccctcattcatctagaagcaaaacactcatggttgctacaaccatatgtaactgttgagatttgaaccatttcctgaatcgatgcaagtgggagaagaaaagtcttatggaacagaacttttccaaatgctatatgcgaactacctatttccctatttcccatcacttaaatgtcattctattacctggagttcttctgtttgctgattgcttgcctcccaaggacaaggctggtgtcccattacacacacacacacacacacacacacacacacacacagagagagagagagagagagagagagagagagagagagagagagagagagatctgttagttcatagattaccagtatccactcagttctttaccgtagtggacaacctagcatgaggcacattgagtttgccagagcactcatgggcctttcagatcttaacccatccccacccccatgtgctcaatgtcccttagtctgctgaggggttagcatgcaaaataaatattgttttctgtgtgacagacacacagcatagttcctgacaccctgacaccgatggactcactcctcagcaacttctttatagaagtcaatttgagttctcttaagaaatgcatgcctttaatcctagcacttgggaggcagagttctcttggaggctggatctctgagtggcaggacagccagggatacacagagaaattctgtctcaacccatcaccacacccttggcccccagccctcacccctgttcaagaaaaagaaagaaatgaccttaggacctggtgacacagttctcagcacacagaaaggcctcccattagtgctccaaattaattctttattggagtgcaatactgattttaagaatttgcatattaattcagatttgttctcttcctttctttcccactttcaactatctcaaatcaggaaggaagtcactacaattagagaccagaattaaggcattaaatccaacatcatgtcctgatactacagtcatgtgtggtactgtcaactttatgatatacaatgtcaaggttattggtatttatattggagtttaaattttaaatagttccctggtatatgaaaaataataatccaaaattttcctaagattagacttatggttttgtaagtagagacctaaaacctaagaaagtaacaatattttctttagctccaaactcaagtgtgtttggaatgtgcagccattccatacccctatacaaagatgggaaatcagtcagagctcacagcttccaactctggtttcaccatttctaccaacattgccaacatcttcatggttaatttagtgtcttgctcatatgatggtcaggtaatacaataggtggaaacagaattctagaaattacttttaaggctaagtatgtagtttggccgggcatcactgagggcagtgtggtagaaaataagctttaccgggacaggagtctgcctagtccagacacacgtctttacttttgggaccagaagacattactttcccagaagtccgtagcatcctgttctccttctgaatgaaaatatttgctgccaaatacatgctcgggctatgaaaagccaatggtaatttttctggacaatctggcagttcagcttctgctgtgcatgaattaattatttttaatttgatttattgatattactacaaagttcaaagtacagtatctattcaagcccatagttttgggtggggccagtcattttttttactgaaccatgtatataatattttatgaacttgatggaagttgcttacaaatagcaaaaccagtaaacattgtcttgttttttttttgtttttattaaaaattgtagtgtgcaaaatcaatgggcttcattatgacatcttcatccatatacatccttgaagattttcttatttgattgagtttcctgttctggggttttctctctttggcctgaggttcctaagatctctggccttgttcttctacacctttcctttaccacttagaaattcctgcttctgaccacctgttctttgcctgcatcttgtgtgctggtgatcttcatagctctgccataaaaccacttccagcctcactcttactggaggagttccctcatgcttgtagcttctgttctcatccttgatgattacacataagttgtagcatgctgtgtcaaacttctgttaagtcctgtatgtctgtagaagctcccacagactcagcctaactgcaatttacctcatcgagtatctttttatccataggtctcctcctgcttcccagatcttactggatgggtgtccatctttttaggtgtctaggtaacaaagaagcctttgctcctccctcccttttcctttcttcctatctttagaattcatctctccaattccagagatgtagtatagatatttcaatgtccacttttctcctattctcatttcctttgcccctttcacctctttctctagaataattgctttaataacatgtacatttccttgtgtctttctgaaactcttattactcaggacatctgttcttctcttacctggaaaaattgtctcatgcgcaactcttcttccatcctgaaaaaacatgtcaacttatgcctgccaagttatatatcaaaaaactctcccaaattcatcaaggtaggagtccctggcaatgggagccttgggagccaagtgccccaaggcagtagctgcttcctccacctggtcttggcagcctgtaccactgactcagccatgttcccatctgaaatggtttcaacatttttaaagagcttttgttcttgactttgtggagacatgtgttatctaaactgtataacaattcaggagaaggaaaataaccagaagtgaacatagccaaaccagtactaatactaaattatctgcaggtgaactgctaagtgaagcatctttgggtacttacatactgaaaacactaataatgttgctgtaatgaaagctttaacagactcattattgagaaacatgaggctccaagaagaggatgggcacttctgtgtgttacatggctagtggatataagtcaatacttacattatgctctagccagcctctttccacttaagtcattggtctttctaaatgttcatatgaagttggcatactgaaaatgtattgatttgcccaagcaatcacaatgtagtgggtttgtgtgagcattagatccagaccaaccagatccaagtgctatttcccaattcttgaacaggcaaggcagtttaagctgagtctccagtttcccacatgtaaaatgggtataaaaatagctgtgcaatatagttgttacaagaaggaaataaagcacatatgtaaaatgcctagcattgtacgtagcagagatttgtaactaaaactcgagcagcagctctagatgtggtataacagactcattaactttatataaactctaaagaaaaagaaattaccatggacctgtgggtaccccaaagcttccatcaaaacatataagcacatctgagactcttcctgcccttcatagctttactaggtataaaatggagcaaggctacctactccttgaattaatctgccaacagaatgactcatcaacttgagtacagctttaaagatgagttaaaagactttgagttaatcagatgcatgtcttcccagatataattatgctataaataatatcaccaaccaagtgacctaaaattaagtgcacagaaaaagatagaatcgtgctcctaagacaaaaggaaagatggacacgggggagataagaggacaaaggcttgcatacaaggtgagagaatgtgtgtgttgaatttgtagaggaggaaagaccagggtagatagcgaaagggcacttatgtgtgggagaaattgttgcatagattaaggttaagcaatttgtctccttgacagtggatgaaatattttcagcttaattgcactgaaaaaaaaatattgtgtaaccagaggtttgtcttctgtcatctctaatctttccaatcagtgcactcaacaattatgccctttgctccaaggcactcccgtcctgcagctttcacctataaattagggactacctttcaatatgtgctttcctgccttgggttgcactagaacaatgccaacaagatgtgatctccacatggggtttgtggagctgtaatcagatctacttaaatatgtatttccccccagtctatcttttcagcataaggtacagtaaggaaactaatttcttgtaatggtaccaaggaaagaaacataataacaagcatggaatggtgcctctaggctgtagataaggcagtatgagtaaggtgatggaagatttctgtgtgtgtgtgtgtgtgtgtgtgtgtgtgtgtgtgacacacacatgctgtaagtaaacacaaattcaaatgtgagaaaactcatttctcagttggggtgcctggtggactttagctaggagcagatgttttattgtctttctcacttgagagctggtggggtgtgaaagattaatctggcttactggttctccaaacacagttggaggagccgaacttaaaactgcacctcactgtgaagaaggtatcagcagtcaatgaattcatcaatacagagaaaattgctaaatgaaattttcttagaatgacatccttaagagctctctcagcactgctcattgttttgatctttaatgtgtctagcaagttgcagtctgtgggaacagatccctgcatcgtaaagagatcacccccctgcttacaccagttatataaccctccagccacaaaccattgaggaaggaaatggaatgaagttagggaaggacaatccaccatatttttagtagctttataaatttatgcactagatttattcagtagtaattgtcttaacaggttggacaattttatcattaacatggcattccattcatttacagtatcactccctcattaaatattctttaagaggattttggttgagttgggatatttaaattgaggagctataaatctcttttctttaatgaatttattccttcttaagaaattaattaacatcagttgtggaggaatgacatgccatcaatgaataaagtagtgtgcaggcaaagggtaaaaggtaattggtgagaaacgaagtgaacatgctcccaaggtaacttactaatggggaattttcatacttacatggccaaccggaagttcaccacgaagtgtgactgtgctcatctgaggttattgttccccacatttcatttctctttccccctgcttttgaccccccccaccccaacctcatcctttctgtccttggttccaccctgtcttttcccataagtagtttcattccatttcaaccctatgctttcactgagaacttggttggctctgggatacaaaagtatcctgagtcagcttggctccagagctttggctcttgagaagccatggcagaggtgcaacagaataagagcaagcccagctttccaaggtgggaaacagcctctcaaatttaattcacaggctgggaatgaaaatgtcgttgcctcactcagagggttaatcactttctaatttgaaccagcaaattttataatgacactgtgaaattagcagcattttattgtgttaattatctgcaggacactatatcattacttctaataaatgtaaatgagattgtgtctcttaggacaatacacagacaaggtgaatttttattgggtatttacaggataccagaacagttttttctcttttttttcccttagcttacaaaatacttccaaagtgtcagcttgccatgccagttcccctatattttctttaacacgccatcttaaaggtctttaaggctcttcttatctaactagaactcattttcactcaaagaaatattgattattaagaaccctgtcaagtgtcaacccagtcaaccaagactgctaactgcctcttgactgtcagaacatatatatattcatatcagacatccttttaaaggaattggccatgcagccattcaaatgcatgtggttacagacatacagacaaagctctacaggatgaatgtcagaatatctaggctgctgatagggaggaaaaggtgtccttttctaagtcattcagcaagtttggaagttcatagagccagctataaaatcaaacatgagaaatgctgtgaggacctaccaggcagccaccacatgagttttgtgtgaacaaatgaagtctttctgcattcatgcctgactgcttgcctttcttattgcatatatgtacacataccatgtgtgataggttactgtcttagggtttctgtgaagagacaccatgaccaaagcaactctaggaaaacatttcattgagatggctctcttacagtttcagaagttcagtccatatcatcatggcagagagcatgatagcatgcagacaggtgtggtgctggctacatcttgatcaggaggcaacaggaagtatctgtcatgctggaccgtatcttgagcacagtaaactttaaagccctcccaataagtgatacttcctccaacaaggccatacctactgcaacaaagccacacctcccaatagtgccactccttaggagcctataggggccaattacattcaaactatgatatggcatattcgtggaggtcagtggagaagtttatatagtagattttctcctttatcctttatataaattctggggattaaatttaggtggccaggcttgtgttgcaaatgcatttaccagttgagccatcattttagttcatgaggtgattttaatattggaaaaaggtataagataaaacaaatatataaaaatagctgacaaaaagaccttgtaaaaaggacctgtgataagtaaagtgatactaagattaaaaagcaatggttgctagtcatctgatatttacaaagaagaagttaaaatttaaaatgagccttgaatagaaaacagatttcaatgcccaatgatatgaaaaagtaggtgtgatgatgaataataattatttaaaaaataataatggccaatagctagctgacaactaagatgagccagcacattaatcctcattactttaacaattgtgtaaagtaaaatttgatcttttataattaaataaattgggaacagattaatgaaggaagcaaagttcacagagagaaaaagtaggaaagccaaaattctaaatcatttctgtttaatataaaaccatgtactatttttaatatataaaattatattcaaaaaatctgaaaatcttatgattgaatttttctttacagttggacacaactgtatgtgttccatggcaatgcataccacattttcattatgtgtttatccattgaggacatttaagttgtttcttttttcttgctattgtgaatagagcaacaatggacatggcagagcaagtgactttgaagtagaatcttgtagcctttgagcatattccaaagagtgatatagctgtgtcatgtggtagacatacttttaactttttgagattctctatactgatttctattgagggtgcaccagattgcaatctcaaaaatagagaatgaaggttcacctttcccccacactcttcccagtgttctcagttgttttaatgaacttagccattctaactggggcaagatggactctcaaaatagttttaatttacgtttccctaatgctaatgatgtcaaacactttttgagatatatcttagccattttaattttttcttttgaaaatattctgtcaaatccataacccattttaattgggtcattttctctcttgactcttggttttggggttctttatatattctaaatattaatccttattaggtgtatagctggtaaagattctctcccactctgattgtgggtttgttcttcacttggttgactattccttttgcagaacctttttcgttttatgaggtcccacttgtcaaatattggtcttaatttctgagggaataaagtcccattcaaactgttttttcccaaacctatatcatgcatctactgcctatgaattcttcattcagttttagtattttgggctttacattgaggtctttgaccatttatagttgatttttgtggagactgataaatatggatccaattttattcctctacatgtggatatccagttttcttagtactgtttgttgaaaatattatcttttctctattgtgtctttttggcatctttgtcaaatatcagatgactatacttacatttattaatatttgggtattgtactttgttccattgatctatatctctgatattgtgccagtaccacacagttgttattactataccacaataatagagatgaaatctgaaatggtaatccttccagcattgttctttttactcaagactgctttgactctctgaggtatttttgtagtttcatatgaatttggggatttttttttctatttatgtgaagaatgtcatggggatttttaattgggattggattgaatctgtaaattgcttttgtccagctcaacaggagggaattcatgcctgatactataaacctagccaactatccatggctgggaaggttatagacttgaaagaagaccccactactccaattttcctaaggcaataatgctttcccaactgtactctgaatacttacccctacaggtaagtggagccctcacccctcaccaaagaagcttccttttgaaacagatgtagactatatagagattgatgtctggtcaaaatgcagagagaaagtgctgtgaagtcaaaccttaactgttacatctgcaacaaaatccctacacctcagtctcagggaaagtcatggaaggaaggaaagattgtaagagccacaagatcatgatgtctgctgtgggatagtgccttcaataaatgacaggaaaggacccatgaactctcatcaatatggttacctgagcacaaccaacataaggacaataacagttggcatgccaacattgacaggagaaatttcacttgaccctacccctacacgaagacctacagtgcatgctgagaaatggagagcattctccagggacaaactacgacataggttgtctaataccaagagatcagttctgaactcatgtgcatatgagcaaagataaatatgaactcagtatattacatatgcctttatacataattatgtatatacatacacacatatatatgttattgctatgtatatgcatatatgtgtaatgataataattaaagaagagatcaagaattggcaagggataataaaggaggtgttggagaaggaaagggtggggcagaagtgatgtagatacagtggttatacaagaagttttcaaaaataaaattattaaataaaaaatctaaatatcaaatttggcatcatatattttcacaggggggtaactctgagaatagtgttgtggctttaagaaagtgtcaggagagaattaatatgcagtttaaaactcaaatcctacattccaaaagttataatccacagaggtacattacctaggatatggtggggatcagaaccagtacttcacacatgttaagcaaaccttctaaacaggactgcatcaccagctcatacaggttgaagaactgtcttaggcttttctggtctttaaagttctcattgaaaaatcatctattactctaactgattgcctttacatatgacctaagcctttactcttgctgccttcagtttctttccttgtcctgtatgtttatgttttaactgtaataaagtgtgaggagtttcttttctagtcctgtctatttggtgtgcttcttgagcctggataggcttctgtttccctggattttggaagtttccctataggcttttattgaaggaactcctttgaccagaagttctcatttttctaatgcccatattttgtagattaaaatatcttcttatgctgctccagagttcctccatataccgttcatgagggttttgtaaatttatcattttctttattgaatgattcaattcttctttcttgtcttaaagccttgatttttattaaacttattgactttttcatttctagcttcatttcagtatgggctttcttcagtcactctacctcttatcaaattcaattttcataccatgaattgccctcattgtttcattaagcatttgttttcttggacttcaatcaggagtttattcctgttccctttcagttaattcagttgtgtattcatgtcctctttgaactttaactctttgaacgtgttcataattgttcttttgaatggttagtgatcctcccagaagccatagattcccaagttaaaagctcagtgtcaagtgtgggatatcacttcttgagttgtcatttgggaggctgcaatgactatacccattcaatacaaactgttgccattgttcttgattgattgtagaacttaataagattattgctgaagacacaacatgttgttgaaggggccggaatgttactccatcttagacacagagcagctccagtgtagaaaatgacctatgcctgagttcaagaaatcccccacccaagtttagccaataagctaaacagtttcaaacctggccttataaggctgggggtgaggggcaaagttacaggatatggcttttattagccatatatgtctaaaacatcccataatgggtagaattgttaccagacatgtccaatccacaggcaccccatctaagtgctccttgactgaccaattagaacaaagattagctcactaagtttcaaattcccaagttccttgtaaaaagggcctctgtgccttcgtcctatgttaccatcaccattttgtgtagatgatgacccatgcatgctggctatttctgcagaataaatattctgtgtgcttgcatactatttgaatctggggtctttcttcagcgattctcagaccttacattatgtgcacagaacttggagaaattaaatggtcactgacctggaagcattcttcccactggctctcttacacactgccagaaggtgttgttcaggctgtcctgctctaaagggaaatggcctcaattatcttacccaactgtgaaccctctgaactacctatgatattgtctggcttggtaagatagacccatggatacaatagtggcatgaatgatatgggaataaccatcatctttctaactggatttaaggtctgcttcatagagtgaggattaaatacaaatggggggattagattgctgctctgatttgcagaggacagagcagacacaatgatagactgctggatcttctctcagagattgggcctccattttagtctcctgagactgaataagcagtttctgaaggagccacaaacaaaggacaatcaatatccaacactcccaacagcgaggacaaggaggcctggcacatgtagtataaggccaggccaggcctgagccaaagtcagcagataacaaaaaaggacaaatcctggaagttgtctgggcctgcaccaagatggaaaagctgtaaccttaaccagcctttgttagcccaagccaatcagaatgtattaatctgactaccacttgttaagcctattgtatctaaaatgacctaactgctctagaacctcgccttagctgtgcttaaaagaagcccgtgagcttctgggggggaggggttgtcatcaccactttgtctttgggtgggatggatggctccagcatgctggaataataaatgttcttgctgattgcacatatggatggtggtcttttggggggacttctccagtatcctcctcacagatttaatggttattctcttcaaaactcatgttgaaatttcaataccattataacagtgttatggacggagcttttaagaagtgactaggtagttagtgttccaccccattggtgggatcagtgttgtttgttaaggacaaacactacctccttttaatgatgatggtagttgtaagttccttgtctgatgctatggccttaatctttcgaattatacaccagaactctaacagaatgaatatatttcattataaaattatagtctgtctcagatattctatacaatataaactcataaagatgctgtacagttttgtgagattttacaaacttaaatgagagaactttgaaatgagaaacaaatgaatctttaacatggtcaacccaagcattgcatgtattgtaggtatttccatactaagtgactatgagggaaacaaaagaacacagtctcttcaatcaatgaaatttctgtctagttggtataataaggaagcatgaatgtttcagggagggaaaagtagaaactagcttgaaattaatgggctcctcatgacacttacaccatgagtactataaaagacagaaaatagtgaatttttaggcctatatgagatcacatggtaaggtaggacttgaattatttgaattactaggacttaccttgtaagatgagaataagttgggagggatggaatggtgacttcataaggattacatttgattgtcacttattactgtgttagcctatctctgcggtgaacttaccagtggatgttacctcttacaacagaattaagataacttaagagagctgaggacagaagtggaatgtttgagttgagctggacatgaagaggatcactgcatagatataagacttttgatattaagaaaggaccaagcaagctcctggcttgcaaagctgcttctcacatatgaaagagacatggaatgaacatgttcttattgctgagttgagtttagcagttcagattacaagtgcttaaaattcagcactaggtggaaatgagtaaaaggaagttaagcagaaatctttcctagttttgtttagagataaataattcaatgtgtttcttccttttttgtttcttttgttcatatttattgagggactctgggaaactgagttaatgcagacagttctaaaaaaacaagcagttgtagaatataaaaagtgaaatgactatttttccaatttactagaggaaaattaatctcagagaagcaaattataaaatatcatgagtgtaacacagcatgttggttgacaaaataaataatgttaccaaaatctctatgtaaggaaaatgactcaaaaatcatgaagcatggtaacagatgtgtagctaattgtttaattgcaaaataattataaaaaaatgtaaaggtctctaggaacaataattcttagattgggtcacaatatctaaatacacaccaactacaagagttatacattaaaaaaaaaaaagagtaagtgatccagattttagaagtattaggagaagatctgtgcaaatgcaaagtataggggttggaagagaatggcgcacacccaaaggcagagtgctgaatacatagataaatattatctgcccaaaactagaatccatggggtagatcaactgttctaggaaagtttatttggatgtatttgaaagttcacagttccagaaacattactatttgcctaaatagctttaaattaattatcaatattattattgatacacacttcctatccttctgtgggaacacaggaactctaccagatggagcagcctgtactcatgtactcatcatgaatgactgttacagatattctgtaagtaacacccatatttctatggcgtttaagccattatgcttttggagactggattttataacagtttgctttaccttaactaatacagacagtaaccatagtgtgtgtgtgtgtgtgtgtgtgtgtgtgtgtgtgtgtgtttgtgtgtgtgtcacagagaagaggtaatgaaagagagacagagacagacagacagagaatactgttatgtggtggtctgttttcatacataccacactttatcacaattatttgcttccctgaccataggggtatattgttaagtagatacaaataaaaattaattgtgtttatcttggggtgacagtaccaaagatgaattgtgttctcacatttattcttatttttcgattgtctgcaaagaacttacattttaaataaaaatattgtcttatccaatttttagacatcagaaaaaaacccaaatcttgtaaatactcttaagtacagagaaaggcttataggtcattgctgactcttgagttttaggggcttgaggagctcactaattacaggaaaagctagtctttctgttcttcattcatcaaacactgagtgtaaatcatttgcccaggccagccagacacagaagacatcctttacccttaagaaaagatggttacacaaatgcattattattggatgtgacgagtagcttcaggatggagctcagtgtggactaggtcacatgcaagaattaccaactctgttttaataatctctcataagaggaaatcttggacttgtttattttttatttaaattatttaattatttactcataataaatttactcatatttgcgtatccatccccacattccctagccctctcgtcttcccatgttccccaccaaccccccaaactcctccccagggatagtgaggctctccaaaggggacgttcaaagtctatcatatcattcaggggagggcttaggccctccttgtcgtatctgggctgtaatagtatccctctatagggaatgggctcccaaagtccatttgtgctctagggacttggttttgaagcatgaattactctgtggaaaagcaggcagaaaactgttcctttgtacacatcatgcaaacagctaggggacaggggacagctcaactacagctccataacgaaagatcccaggggaacatgaagcaggcatggagtcggacagaaagggatggtacaggctttaaatgctcatatttgcctggtgtcatggaagtaggctctcgaagtaaggatgtattggggataggagaatggaggcagggctggcacagaggttcatagttagccctctctcatggggagcaggacagtgcacaagacagctcctccctcaacatcatcgaggcatccaggcagcagaaccactgctgttgtcacaaaccctgcatatttggtgtctttgaacatggcatacatatggctggtgtttatacctttccctattgctactttgagagaaaacctgctcagaaagccttcctgcaaaaggacaccagtgaaggtttagagctaattttacgttctttgcctacaactaagtcttgcaacaacttcaggagtcatggctagtgtgctagacacatgttttataagaaagaaaggaagaaagaaagaaagaaagaaagaaagaaagaaagaaagaaagaacatttctgtctgccattaaacaatggctcaaataagccagctgtaactggaacacctcagtgctggcatccagcattctgaccagtttcttcccctacacaatgatgactgtattgtaaagtcttgtcgtcttccttttcttctacaaatccatttctttctgcacagaccccttgaatctcatgtattcagattggaatggaagtaaatttgaagtgagttaagacaggcaaagatgcattttgtcatttcaattttctattttctgataccatatgtcttggtttcactgtgttaaattactcagtcaagtacatggggagcaaggttaacattgatcagggtaaaattccaggactgtattaacaaattcccaccactttgatgacgcataacaaaagaaatttctttcatccagactccaaaatgaagttgctgccagacagtctttttgcaggctcgagtaagggaccctttctctgtggatctcctagtttctggtgacagttggaaatgcttggcatcctctggcctgtgtctgcatcactctatactctgtctctgtctctgtctcatgtcattttctcctctgaacttttcttatggggcacttcttggtgctttttaggaccactcagagaaaccaagatgatttcatcctaagatacttagctgtaagcaaagggacattcacagattctaagtatatgatggagactatcttgtaggggagctgccaccagtcaaactgcttagactattacagctctctgaagacagtgctttgtctgtatgacaaccagaacctggaggatcaaacagaggaggctcaacagaaccaaagctggaactggatttggtattcaacattaacacagactagattcactgaaccacagtgtctaaaggggcggccccattcctgccctttctgagagtttaacttcaatgaattcatttttttttctcggaaagcaactctccacatttgagcaggaaagttcacagaatgcaagaaaatacctcctaccatcttccagttaacaataatgtttcagagaaaagcatcgttttgctttattctttgcttagattaaaaaaaaaaaaatttgtgagacatataatgagctcaacccaggatacagccagctgctaggagggttctcaaccttaaaggcacccaaggagaaactcttgaacatctgaaccgacagaaaggcaggctggatgcaaaggaccctctttcactgctatgtgtgcgcacgtgtaagtgtgttcgtgtgtacgcatgggctctcccacatagctcccttcccctctctctgggttaatgacacttctggttgatttattgattgcctgtaacaccactggcttttcatgaagcacttgtgatcttcccagtcgtaggtgccacccccaatggaaagctgctcccaaactgggatgttttgattgctgtttggcttccccaacttgactggtcaaggctgaaccttctcagcttcccccgaataagctccttaagcctgttcccttcgaagcatctgtaaacagttgaaggtcatgattgttcactctgcaagatcgatatgccattaaattgtgacaaaaaggactgccagaccattaaggcttccctcataccctcagtaatcctgataaagcgatgagctgttttaacctcgatggctcccatggctaactactagaagccgcctctctgctgagataaccctttctgtgcaaagtcaggacaacccacaaatgactgccaccgcttcccagctgcttctgctgtgcatttcctcgtgctattgtgtagttacttctgaatttaatcttctttccttttttgcccacatactctgaagcctagtgttaccatcgaaattatttagattaaaattattttcctttaagatgaacaggtttctttaaagcttcatgtggataaatttcctattagtagagatgaaaactaaaatactcataggaactgggaatggcacaaatcctacttatcttaaacacatttttcttaattcaactaattttagacatgtgcaatgttcaaaataatgaatgtttgttttggttcccaagctgtaaaaagaggtaagaaactgggattttgtttaggagacagtcagtgtcttactgtatagcccaggctggctttgagctgggaatcctcctgcctcagcgccttcagcttcagctaaaattgctgttgtataccatcactgcaaggaggaggttgagataaatgaggcaaaaggcaaactttgtgaaataaaaatattatcagtggatctaagcattctgaaaaccatcttaaaattaaatttagaccagccaaatcttgttattgcatgagcttatttgaagagccgtgattccactcaatgcatgtccaaataaactgttgctgttaattgatactcagtgggttggaaaagcctgcaagaacttactgagataaggttgatctcacacattacctgatctctctctctctctctctctctctctctctctctctctctctctctctctctctctcacacacacacacacacacacacactttaatttgttttatttttaattgtgtgaatgtgtggaggattgtcctggttaaggaaggtccttgtagaggccgaaggagggcattggagccccaagaactgaagttacaggcatttgtgagtcaacaagtatgggtgttggaaactaaactctggtcctctgcaagagcagagactactctttgaaagaccctgggaagctcaggcctccaggatctcagcccaggaccttggccaccccaatcaccattcggaggtggaaacttgatgcaaacagcaagaggctttattgtagttgtttaaccagctaaccccatgttagctcgggcatttcatccacccaccatggcggatggctagaaagacggctcgaagcgtctgcatagagattttatagggcagcataaggggagtgtctagcggtacacacagactcaggattggtgtgcctccagacttggagggtttgccctgtgttgattggttaactggttgttatggcccataggccctcccagggtggttgctatgctctgtgagtcattgttgtgcacttgtccataaagcatagcaccaccagctaacttctgattggttccttgccacaaggcaggcatctgacttcctagtgaccaagggcaaggtcatggcaaacatgtgttactgtcatggctgccgaaatggggagctggtcccttcactcttaaccactgagtcatctctccagtccccaatatatttaaaaggttttatttttaatttacaagttctttggtaaccaacattgacttttataaacaagctaacataatggtgatacaagtgtttacactccatacttagatgcacatacatgtactggcatgcacaatactacttttgtatttgctgaactgtctacaagatacacacattgtctattggggaaagtcatatttgacaagtgttagcttagtatgacttttcatgttgtaagtgctttaggagaatactgatatcaataaagctaggaaatatttgccctaaatatgatgagtaaaatctctctctttatcagtttggaaagctttgctgcactcctgtcagctcaagacacacaggctttctgggcataaacagaatacccagttactccattttcttcttgctgatttgcaagcttgagttttcaaggaaatcaggtctggccctaaatggcttattatgtcaacaaaacataccttcaaatgaaaaacacttgaaaccagcaggggctgcagggagtaaacagaggaaccagtcttagtgtctgctgagcccattagatctcacctgcatgtctttcttcagcatatcaatagaataatctagaagggcacaagaacaagaacaaagccttgggtcaatgaaatcattcactgatcctcctgcaaagcgctctaagtggtgtattagcttcaaatctccgacatgctgcttaggcgtcattgcatgggccctgaaaccagtcaaacagacactgaaagcttgaggattttgtttctgctttgccttgtttgaaccccaaattaatcctgaatttcaattttttttttttttggcttttgaatttgctatgcagatcctgcaacacgaagtaatttaaacagataatgatgacttaatgaaaccgatggtgtcttatctctccctctgtacttaatcatgtctaaacccatttacagatttctagctcatgtcacttattaacatatcaaatacgtatctggtgcctactagatgtcctgccatttgctaatatctgaggatacttagtgaacaatgtaagtagtaaggattccccggctattatagcagagggactaggtaagtaagacaacagggttgccttttgcaacaacattgatcctttgaactggatatttatttggatgctgattcaactgagctaccatgacaatgtaaaggtacatcaccattaggaaaacagcatggatagaacagtgtaggggttgtttgtaaatgattgttctctttgtcctcttaccctgagtctgatctctccatcagccaaatgagcagcatcccttggctgatctaaaccacagccagtgtataaccatgccttctatctgcattccatagacaggccagttgcaaggcacatgttaggagacaaaatagtctattgctcttgggcaaggtgctgggaaatattggctcatacagaaatgtttcaaaaaaaagaaagaaagaaagaaagaaaaaaatctgtcatcaggaagatatggacttttagaatttattaatcacatttagatattttatctcttcatattgttctgtccacattaaaaggagaggtggtagacagtaaggtaggaaaatgcagaaaagagaacagaaagagtttgagataaagtaagtgtggccatcgtatcattccaagggctgtcacgaagctgcttttatctcaccttcatctttctctgttgtgtgggatggaaaaaaacttggaaattaaaaaatgtgtatttacattctctttgggaggcatgtggggttctaatgaatgtttggctgactccaggaaatctgcctttttaggctgaatcacacccagctgtttgcattaaagtctatccaatttgattttcatttgtcaggctgatccctttgatgtcaaaattactctctccttctcatttaatgcttaagagtttccagctgcccttggctctggacttgtgttgagatcttcagccagtctttggtcatattgttctactttgcagttgtctaaactctatctaagtgatctcatacatcttgatgacctaactcaaggcaattcttcaagatgtctctggacctgcttttttattttttttttttaaagatttgcttgcattatgttcacccactggtaagcagcttcggctgtgtctactcattctcagagagcacgccattcataccaacatcttctgttcatttgaacaaaaaaaaatgttcaattctcttcggaatcattgattgccacctgatttacaatgcctccttctctccttcagaacagattacctcttagggttgaatgagtcacaaattggtttggggatcctaagtagaccacagagtgttgaatcaacactttaagagctcttcagtggcacagtattcattcctagttcttgggattcattatgagagacatctattgttgtcttcctttatacaagaggaaatcagaaggctagatggagtacccagaagaattttctttcgaataactatctaggccaaaactttgctctgcaaactttgagtcacactaaattctatttgtaagaatctttgtgtatttctccaattatcttctatcagttatatctgtccaaccatctatctgtctgtccatctatctccatcatctctatcagttatcatttattggttgtcatctttatcttctattagccatcatatctatcagtcatctattatcatttatctttcttatatgttctctctatagataattcaaatttatcttttttttttttttttggttttttgagacagtgtttctctgtgtagctttggagcctattatggcactcactctatagaccaggctggcctcaaactcacagagattcacctgcctctgcctcccaagtgctggaattaaaggcttgtgccaccactgcctggctcaaatttatctatattctaatctatgtctaagtattatgttttggtcattctaccactaatatgggatgcatcaggtagtttgttttcttttgaaataccaataacttcatttgtaagtaggaaaagatgcttctgttttagggttgtcatgaggtttaaataaaataatgtaggaaatatccaccatcactgtgctaactggttttatgtcaacacaatacaaagtagagtcatcagagaggaggtagcctccatcgagaaaatgcctccataagactaggctgtaggcaaacttgtagtacttttttttcactagcaattgatgtgggagggcacagcccacgttagtgaagccacccttgagctggtggtcctgggttctataagaaagcagactaagaaagttatgggggagcaagtcgctaagcagcattcccccatggcctttgcattatctcttacctccaggttcctctctggcttgagttcttgagttcactgctcttgaagataaaatgttatatggaactatgaatgaaatagaatcccttctccccaacttcttttttgtaactgtgctttatcataacactgatagccctaagacaatcagagtggcataaacccagtaatgacatgaggaagagtatttccaaacctcagcatgaaggtaacagtcaccagaaaaagaaagtgctagggtgaaaaagaataattgctgttcatctgtagttgtccccccttttcggaattgaatgattatctggctgtagagcagttgaggttggtttagtgtagattctttgaaaagtaattatgttttcatccttagctaatatagtctattcctgctattacttagttgaacactacccagtcagtgatgaaaacaatcaaaattaaatatcagtatttcagaattccaaaaagaattagcagggtgtccttctctggatgatccaggggacagcttcttctttgcattctccagcttctcttcccatattcctctgttcaaaaccctattagtgattatgcttcagccagtacagctccttttcccacctactcatgggccctcaattctccttatatgaatacaaaaaggctgcctggataatgtcccattgccccttctcagactctctaacttacttgtagcaaaatctcatttgttatgtgaaataacatggtcacaggtgctggcaattaggacaaggacatctatagagggtctttatcttgactatcatagctaataaaagcatttatattgaaaacactgttcatcttctatcacttatcccttaccttatttttcaagattttacttcaaaatggtagtctttctgagatgagatgcaataagcaatgactttgggggcttgtaggtctcaagggaagagctttctctgttcaatgccaagcaccaacacacacacacacacacacacacacacacacacagagagagagagagagagagagagagagagagagagagagagagagagttatagtccttgtaacctttgtttctttacagatcttttatttaattaaataatctctgtgatgtatttttctaggtctgcttgtgtctcatttcctttgtttttacttattttgcttaaggtattgttttaatttttctttatcatttgagacagggtccttctcagtttcccaaatgctagaaatccatgaatgtgccattgaacctggatcctctgcctcattatactcaaaactaagctcctcaaaagagagcttttctttgcttgatgtactatttttaaaaaagttcctctccatccatattctgaaacaaacattctttaaaaattgttagttgcctttccccttagttttttaatggtgagtataaacagtaggcaaactgaaaaatttaagtacaggtgattagttttccaaaactatgtccatgacattaaagaacaatccaatcactgttgaaatttacaaaatgtgacttaattttcaaaaccatgtgatagtacatcatggtgtctatcatacaaggtggtagattcagggctacaaggctaagtcagataataagctgataagagtccctaagttccatgacgtcaaagtgcttcatctctgaagatcttgggttcctaaaccttattatgctctctttgtggtcagcagtgctccttcctttgaggccatgtgcactgacaatactcatgagcttcataaacctaaataggtttccaaaagtgttctctagaaattatgagaaggtgacatctattgtatctgctctaccaactgcaatgtttctcaatttgtaccattgttagggtttgggaatatggaaaatattagaaaagaactctgttgttgatgggggaggtccttctgtgtatatgcttgtcttattggttgataaatatagtactcttagccaatagggaagcaaattaggtgggactaggagtcgagaaggattctgggaaggcagactcagaatataagcagggagaagcaggaaattgtatgcttcctctttctccttctcttttctctgaagagctgctatgtgatcctgggaagaggacacattctgccagcattctcaataagataagtctttataaaatataaagattagcagttaccgttgataattaagactgagttagcaagtaagaaatcccagtcattagccagaagcattttacctaatataagtctccgttattttgggcaaccacatggtgatggggctcgggaggcttggtggagtgatttattgttacatgtcatctttaaattccttgagaacaatcagaatgcattaggttaaaactgaattcacaaactcatctcctaagttttggcttttttcactgctggaacttagaagagtcatctgtctcccttcccccttcctcctaccctctttcctatattctccccttttcttcatatttattcttcattttcccctcctttctttttctttttcatccatctccttctttgcaatagtataagaagaaaatataaaatctagtctcttcttccacaagtcctaacagtaaagagtgcttatttgttcctcatcttcctgtgacactgcacaaaactcagatgaaataataaagccaatgggaatatttttaaagacttttcgagttcttaaaaatgtattgtgagcatttgtgtgtacttaagaacacaaattgtcataacagataattgaataccctgtatggttaaataatagtgttttctccattttctccttgacaaaaaggctaatgtctccatctgtaagtttctcaccagagcttaaatgttaaaatgattatttttttcttaaagttaccacatacatgaatctatgtttatttgctaagtgcctcaattatccaaaatattttcaaaacacttctttagaacctgccttctgtgacagtctcgactctgtcattatgtgttaaccaccctctgtttgactaagaatgacaggtttggggtttatcttattcaccaaatttaggtccaatcacttttgcttattgttagatgacaacatgaaggatgaatgtttatcagtttaagaacaatcaggagaatttgcccacataggaacaaagcctttaattcttacccagtaacttgccataacagtgaatagtgaataaaagtcacatctatcaaatgactcaatataacagttcagatgaagaaacttattttataggcaaatatacaaactaaaaatccaaatataaaaccatcagtgcattatcacacacacacacacacacacacacacacacacacacacacacacacacacgcccctatactcactaaaatggttacttttgagtggttaaattatgaagtttctattgtattcttctttttttaatttctataatgtgtgcaattacctttgcaatcaaaatgtaaaaaaaaacactgtattacaagttcttaaagatacttctaaatacaaattttaaaatgttctccgtagtgatattctcaccataaagaaataataatagcctggaagtcctccaaactgtatggatgtgttttagttacatttgtagaaactgttgtattcattcaaagtagaaatgtgtgagtaaaggatacacatttctagagtacaacccatttctttctagggaaattgaaatgaaaaaaaaaaaaacaaaaaacatgtctaatacctactgatttcctcaaaattacttgcattgaatcatagtcagagcataatagcacatgggattgatgtcagtggtcagtgtttgggcacaatatttccaggtcttttggtatttgattcaaagcactgaaataaatgttcacactgatcaccaagtagcaaggcactttatccaaacagtaggggccagcaagatgtctgtctcagcagctagaagcagttgctgcccaagtctgatgatctcatttccatgattccaagtgaaaaatcaaatgatgtggtggtcgtctttattccaagcattcctaataacagttgggacagggaaatatccaagaagtccaagagccagctactctacagtacaaacagagtggtataaataagagagactttgcctcctcaggatggaaggagtaaacctgggaatgggttgcagaataaactttttctctcatttccacacactgtctttctctctctctctctctctctctctctctctctctctctctctaattaaaatgatagtacagatcaggaaggctgtaagagagcagacagccacctgagtaagagttttcaatagccccccattacttagggagcttccatgtatggggtcctacagaaagagggaatggttgctagggatgttgctaacagtttctcttgtcaggcctggccccacgacccttctcagccacaaataaatacacagatgccatattaattataaaactgttggtagatgactagggcttcttattggctacctctgtcttaattattaacccataactactaatttatgtatttctacatggtcttatctcaccagaaaactcctagtatgtcctatctttttggcctatctggtgggttccctctgcctacctttcccagaatttcccttctctcctagtatggtatcccaactaaccttcatgcctggccactagccagtgttttattcattaaccaataagagaaacatatacagaagaacatcccccatcttgagggattggcagagttgagttacataaagtaagcattatttatttttactgtgcatgttcttttccatgatatatctggtttgaatcatttgtacacccagtcatgtagagacatagatggcaagttgaggattcttcctaaaagttcagtctgagaaaataattcatcttattgtatatggaccccaaacctgtccaggctggatttgcctccttactcccattgcaaaaaatattcagaaatatatttcaataaatgctttgcaagaaaggggagatattgatggtttttgtgggcatagacacccactgcattggtcagagtggtatatatgtgtagctcaatactgttaggaggttcctagattgtgtagagtcatctttgagacatgcaagtgagggctctagtttgccaaatgcattatgagcagaagggtgtgtttatagcctaagtgaacccaattcccaggttactaagccattccctgtgcttgtctgcctatggggtctataaatgactacttgctgccttaatgagtggccctaatttcttgggtcagctttgccatgacaagtaatgaatgtgctttgcaacacatagttacaagtaaatacttgccttaattagacttactgcaaagacaaaaataattcctccaccatctctaaacttagagaatccccctctctccgccctttgctggccctgcctcttgctggacactgcagatcagctaccacccaggcccacatccagagccttgtttgcctcatcccaacatctaccttaggtaacatcactgagacctgctgttttaagagggtccaatgatgatggtgtaccagaaaccaaaggctttgaaccagaccaatgactcattgcactgaacattttcaagcaaagctgattgaacaagagagtatactttgtgatatactgtagctcccaatgccactagagtaaatggagaggtgttggagaggtgggaaagatggagaatccaaggggttttgtttgtttgtttgtttggttggttggttggttggttggttggctggttggactgatttggttttaatttttctttgtgggaggaatgctgcaaggatgaagggctgatatggggggactgataaattcacagaattggggtgcatgatgtaaaattcccccaaaagcaaaaaataaatagtgtttaaaaagatcttagagaatctttccagtcagtggcttgatgataaataaatactaggtagccagtgttccatgagtaatattcctcatgctgttgggagccaaagatctcagggcttggcatgagatcctaggccattcttggccagacacatagttgtatattaacctttacaaagcagctccttagaacctcaactcaagaaaagaaacaatttgacccagtccaccacccacaggctcagtcacctaggcaacccttcctgtacctcttactcatgaactctttaccctgccaaacatcttctttgtggcttcctaatatcctgcctatactaacatctggtgcacaaacaacccattctatccctccccatatcctgctctgctgactatataagctagcctgagaaaagtaaagtttgccacttgatcagaatcctgtcttgtggtcgttgtttctgtgtctcttgttcccattccctatccctgactctcttgccccaggttgacatcctgcaggtcgggacatcatggtatgtaaaatacactagaggaaaaaaacaaaaaacaaaaggatttgatggatcatcgcataaatcacactgtagttcctcatctcagaaaagatgaggtcaattatgccatgtcaaaagctgacatttctaccttttccaggataagggtagacctttgtttttactggagtcagtgtcatccttcagtcattctcagcagaattctatgttgtaaggcatggaggtatggagaagatgtgcatagcaatacaaatagtgatttaaaaaaaacatatctttttattctttgagaattttagactttcatatacacatacaatgtatttcaatcatatacaccccaccctccttttctcagattctccaacacaaatgtgtccccttcccaatgagtagtgaattttaagcactccagctatagttaggatttgggatgttcaccaaaggcacagctataaaagtcttggtctcctgggaaccctatcattaggaaagtgtccttgaaggtaccacaaaaatagatgataaccagccatgaactgaaatcccaaaatcctaggggaggctcagaaggatggccaaactttccccaggtttgagtgttaatattgacagtgtgtgcagaaagtgttctccatagctttgtcccctgggatgcctaaggcctaaagattcctcttacagagcctgttccttccaagattggctaaatcagtctccttttccagctgtatgcagtaactccatcttcctgctcaactgtatctaataaacacactgagcttggaagagggcaatggctgtgacttctccaacagaggatccctactactccatcccagcatttctgaacacgaacctatgtgttttacctttcttctttttctcactgtcccagtccagtcaatccctagagccacgcacacagagcatggaaaaagaatgtttgcgatattagtttttaaacagattttggaatatttccatatgtacatattaagacatcttagggatgaaatctaatttgcacacaagatgcatttgtgtcacatatacactatgcacacataacctaaagtggtttcctgtctttgaggaggaaacagtcatcatgtccacagcagaatgctgggcatgagtcacacatgtcattccaatgcttaaccgcaaacctgaaaaagtcatactgacatgctggagtttccacagatccagaggagacaactgtatccacaaactatgtcagaagcagcattacagttattgacttttgagatcttttgatcacaccacctctcacatgaggttagagagaattccccatgaggggtagtatattaatacttagacttttggattttataacatgatttgttttttattagggctcttcacctgtattaattgatggcaaatttacatcagaaaattttaaatttgtatcataatctgtcaggaagatttcttccttgtcatgagtcaaggctctacaactttctacactgcggtgatgacaagccctggtaagctatggtagctttgcactggcaaaaagatggtgacattccatccaatgctttaaaaaaaaaaaaaaaaaaacagatccagaatataaagcacggaggatttccacatggcatcagctagaactgatctcatagccacacatggatatggggaaatgtgcactctgctttggtgactgcttcccagggacagagagaagcttaagtgtggtatagaatgtcctatctctgcaccatttgtttggacttcttgtgtaaatttattttaaatgcatgagtacatgaattctattaagatgtaacaataatatgcaccgattcactcattcaacaaattgtatgatatatgatatgtgtagctatatgctttctagtgttgggaaccacactagtcaaaatggagtctctatcttaagagtttaagttcagttaaagatgtagataatgaatagatcttcagagcaatcatcacttattaggacagtgataggaggccaataagatggcaagaccccaagaagccagtggctactgagaggcctgattagattggataataagacaagtgatggctacatagataatcattgtgctattcctgcagattttcttaaagtttgacctttttcaaaaaaaaataggtgtaaatagattcctgcttctaaagttagtcaagatgctgtgtagagaagaaactgggaagcagtattaggatagagcatttctggggccagccagaagacagcaatagcctggtatagatacgttggtggacactaagagtgaaagtggacatagagggcaatgtattttggaagtagaatcaatagcatcttaaagactgactgtaaagaaatgaaataatgacaataattaaggagcagtgacctgcactgaaggtgccagtatttgcttatagggcagctatgacaaaatagcctagactgagtagccaatatacttccagaggctgcaagtcagggcagtctgtctagagaaggctggctttttctcacctgcagtgttgaagtatctctcttgtgggtctctttcatgggaaaaactaattggatctgtctgtggcctcctcaaagggccccatctctcaataccaatgccttggggatgaaattttaaggtggagatctggagggaagtggaacacataactgttctgtctacaacctcagtgctgggcatgaatctcacatgtcactggtcactgcaatgcttagctgcaaggccaggaaaattcaaccgatgttctggagtttccctgtgtccagagaatacaaacacatccacagctatggcagaaacagcaccgtggatcttaactctgagatctgagctttccactgactcaccataaaaacggtgacaacgatgtaaattctgttcatcatccattcacgaattcccagtgaccacaaccccaagcaatttaaattagtcaactgggctttgacaagtagatgtattctcaatgggcgtcttcaaaattcctgtggagagaaaatcggctaggcctgaaactataagcttaatgcgatttgctgagaatacgcagttttgttccaggccaacatgttccttggtgttttatgcaagagcgttactgcagtcacaccgaggggaggattcaacgagaatgggaaattatgagaaatgcccacacttcctatttcctatatctattttagttggtggcaattacaatttactacgcaacactcaaaatataaacggcgctatgtgaaaggatataacagtgacagatttgcagcctcaaagcgtgacttcaaaatattggtgtggaaaaggtttcctgttccggaaggcagttgagactacaaagcccacgcaggtgaggacgctggcaggagcgagtgctctgcaccctcgatgctgtgcgaagctgtgctgggcgggtgggaggccctgccggccgcatatggagccgaccttctgtgccaatctcaccaagcgatggcacatacagcaagcagagcgaggaaatcctgtgaagcggggaaactgagagcataaggcccggagctgaaatcaaggcagaaagccaagtttgtggggaatgcagaggcagggttatgcgaggagaactcgccagtgtcttgtctcttcactctgttcaccctctggcactagtcctcggccagatgcctgaatcaccaggggctggcatgcctctgcagccagttagtttcagccagtaagaacctctgcagaaagcctgagggtgagtccaggagaggtttgtttcttcctaagctcttgtctgcagggtggcacagttgttggtgagatggtccttaatgctcccttgggaaacactgctttctctgatgctgatgttgagatgagcactggcctcttaccaccactagcaccagggtgtggcatcaccatcatgtctgttccctttaactcctctcacttctttgtatgctgcgtcatttcattaaatactcagaaaacgcctgtctgtgattctgactcatacagagaattacaaagtccctgttctgtttcaaggagagtgattaaggacacaatggaaagtgtcctgggcgtcagagatacaactctgccccagggagccgaagtcatgcctcagtatgctagagagcaggcaggcttcttgtcatcttgcacttactccaatcttcagtccttccaaagttttctattttacttaaccaacgcctctggtgttcctgcctgggaatctcattcccacccacatgcagacaggtgataacccagtgcttgagataatttggttgcctgcacctgtgtgaaaggcagttctaaccactgggcacatatttcaactgtgaggtatgttcatttcaggattaaatttgagagcatcctaatctgtgcaccgtcattttcgagaatgcaatctacgttctatcagtcatcagcacaggaagaatgctagctgagttttattcacaaagggggagatgttatcccttatcataaataattagaacaccttcacactggtttctacttcctagggttacaatagctaaaacagattctgaagagctgtttacaactgggtaaaattaaacatgtggacaaccatgatgtctacctctgccgctgccctttcccacctccacaggcaccatcttttggctctgtcaggtgtggcccaggctatcaccgttacagggaagctaatgaacacagagcaccagcctttggaaagaggcttagctgcaatacctgcaattagagataaaagtaaccaaagggctatacttgattgaattcaagtgacaccgttcaagctcagatggcagaagtgagggacgctggtacctctcggatacaatagcaatggcccagaatggtttgttattaaaactactcaaaagtcctttcaaagaaaagaagagctcctcttctctccctctttgctaagagtgatttttcccccatttcataaaaattgtggtccaagtttcatgagggggctcttgaaagttctctcttactctgtcagcattacaagtgtgtgtcaaactatagtgaggatggctataatataacattggagttctagtgcacaatggcttagaaaaaaatgaatgggagaacagaaccacagaagagtgaagttagttcgtgtcacttctatacatggaaatgccattggtcttgtggtgtgcaatgacaggagctcagagatgaagccagacagagactgcatgcctaaagctcaggaaactatggctgggatgccatgttactaacggaattgcagaacagatatgtcttaaccatacaccacctaaaggttaagcaaccacatttttgatgggggatgtcctgcatgctaggaatatatgtttctcttattggttgatgaataaatgattggccagtagccaggcaggaagtaggtggggtgaccagactagaagaattctgggaaaaggaaggcagattggaaccaccagggagatgccatgtagctaccgggaagataggacactggtaagataaggccatagattagtagttatgggttaataattgagagagagctatccactaagagcctaagctatcatccaaacagtttgtaattaagcctcttggtgtttatttgaggctaaacggctatggaaccaagtgggacagaaattgtctatacattttaatcaaatacttcttaaactgggcaaagccttctccaaaatgtcttagctgggtttttttttttgtttgtttgtttgtttttttgtctaattctgccctaagaagaaggttctgaaaaggaaaataaaggacagaaattttaaaatgtgtatactacataatatacacaaaattaaaataagtaatatcagagacaagaaagtgggccaaagtagcctccactgtgagaaattgttttagacttcctgagaaaacagtgattccaataaagcaaaacctagaaaatgtagcatttgaataacacaaaacaatgtgaacccagtcaggtgggcaaaaaatatagtctaatgttacctggtcattccaggtaagggcagatgggaaagttgatgataatcagagaaaggatggacttagaatagactcacaggatgcccaagatgcatctttataaaaacatttttaaaatactaagaaatgtttcaccactgcaagcatagcacagtctccctaacgaaacaaggtatctgccacccttgggaagacaattgattacctatccaaatgagttaaccacagacacattgtgcctgacctttagaggaacacttatgatgctgtgttgtagaaagggtagactgtcagacagctattaagctgggaacaagcacaggccttggctgggtaggtacaaccatgtgggctgcatctgatggagacagtgagcaaagagccatgggggagttcccccatgtactaacgaggtgaggcagaagggaaagataaagatgctgggatacagagagattgagggggaaggccccattactgtctagggaagatggccttcccaggcagtacccagtgtgtggtgctgtgcaagggggctttctggttcttcctgatgggtttacattttctttaatagcacaccaagtttatgtaagagcacaaattttttgataacttttattttattatcaataggccaatcagattatctgtttcagagtcaagtaagtgatgttcacaagccccagtacctgaccctggtcagggacacactgtgtctagttaacaacaatgtgtcctcagtatgccctgctcaacaactttgaagggaattggagactatactatcaggtgttcaagcaaagcagtggtatataatgctcctccatctttaggctcccaattctagcttgtaatttggagaataatggaccctggacaaaacctagactgaacaaaaaggctatataaattaatgaattttacatgtctaaatggcagaggaatagaaagaatcttatttagcggtatgtaaaacacatgaacatttcatcatcccacaaataaaactttattagagcacggctatgcctatagcacaaaaattaaaaatccagagattgatattggggttcaagcttcaagctgaagatcagagaagcaaagcagccagtcactagctcttacctctacctcagactgaaagggctgtcctgtctccacaagtcctcagagacaatgctatcttcacaaatcctcagaggcaaatgctctgagttcgccatctcctattcattatattcctttctcagcccagccatatcattcctgtctccaccctcctagtgctgaggtcattgtgtaggtcagggtggccttgaactaacagagatccatctgcctgtctcctgagtcctgggattaaaggtgtgtatcaccactccctgacctgtatagcttgtagcaggctttgcatcctgaatcctcaggcaaattttattaaatcataaatagtatatagccacacatacatacccctttgcttatttgatacacttccttttgtgacaggaggataacagagcaagagacagagactctatagccacaaatccataaatactaaactatttgttatctagaactttggaaatatgtttgcctgtctttctttaggttgatggtttccaaccaaacttccttcctttgtcattcttctctccccaccacacgcctcctcttctttctcttttctctttctcttcccattcttttttctgtctctcccttctttctgtcttctcatctttgtcagtagagaaccagggctcctccctgaaggttctcccacagctccttgctctacagggtacagccaagcactgccccccccagctgtctttggaatgaaagagcctgagatcaaggtccgagccttctttctctccatccaagtggaacagacaacagagaacatgcaaacttagtaatcttcctacttgctcaagtacagaaactccctcagacatttccttccctgttggatttgttcctgccaaaggaaacacattttgtcattttttcccctctcaacatatagcacttagcagaatgaaaaaaatgaaagacttaagtccagtcaacatctcagataaaacatgaataactctaccattgtcccatttctcactatggtggttagaatgaatggcccccataggaacatgtatttgaactgtttgagaaggattaggaggtgtggccttgttggaggaggtgtatcactgagagtgagatttgaggtttcaaaagctcacaccaagtccagtcccactctctgtctgccacctatcaaaaagaatgtaagatctcagctgctgttccaatgccatacttgcctgcctgttgccataatccccaccatgatgcgcattctaaaaggtacctttgttacagtgtttcttcaaaacaatagaacagtaactaagatacccatttgttataagacacttttttttccttctgtagcagtcccaagattaactgaaaatgaattaatagatggttccttttgcctaagaattcccacaagtaaacaatttctaccatgcccaaagcaaagcaaatggcactgagaggcattagagagtgaactttagtcaatgctggtagctgcaaataatccgtaaaagggaaaggtggggttttacttacttcggtatgtctggggccagagcacctactaaaggagcttcaagatttgttggagctcatgctttcagtctttcctgggagggaagacggacaagaagctcattggatgttgtcatgagagtatgatgaagtatgctcagttcacacaggaccagaaaacagagggtgaaagtggaagtagacaggtgtaacactcccagggacccacccctagtgactcaccaaggtttctaaaacctctaaaattaatgtcactagctgaggaccaatggttttgaaatgtccctattggcaacattttcgattcaagcaaacacaaacatcccaagaaaatcttttttctggaggaaaactgggattgctggaagcctaccccactaatcatgctgttctagtttgactgtgttcctgtgaaaaaaatattgacccaaagcaacttgggaaggaaagggtttatttcatcttactctttatagtccaccattcagtaatatctggacaggaattaaagcagaggccagtagaacacggcttgctggcttgttcccctacccatattgagctctctttcttatgtaacccagatccacctgcccagaagtggctctgtccaaagtgggctgtactctcccatatcagtaattaatcaaggaaattccctgacagacaagcccacaggtcagtgtgacagaagcaattcctcagttgaggttccctcttcccaggtctctctagttttatgtactgacacacctagtacatgcaccattttataaacaaagtgaaatactgtttaaaatagttgcttgtccagcaacgacttaaccaaattagctatgattttgtttgttgagtgtgatcaaattctataacaataatagttcttatgctactctctgtaattctagaggaaatgttagaattgattgacataaactaagaatagcacttgctccttcatccttctgtcactaatgatcttttgcatattcagtgttcaatgggagctgagagttagcctgctcaggcttgctgcatttctcagagattagtggatccaagaaactcaaaatgagcaggaattgatcttgtcctttatggtgatggctctgctgctgcaacaaagaagacaaatgcttagtgcagaccattgtgattaaccctataggctatttcagtgagggcccagggcaggcaaagaaaacttgttccaatgaaagtgtaaggagacaatttagagactgcaaagaaactattcactaaccattattagaggtccctttaggggacttgggtgcacccaacaccagctggcagaagatactattacggtcttgagacctaacaggcaagaggaggaaaatactttacagtgttctaatgacagctccattttacaaaagatgtctttgaggcatggaggcattgccagaaccacagcatggactgggtaagatatccgccactttctctacctgagatcatctgccagggaaggcttctaaattaactgagtccaactaagaagtcacgggtcaaaaaaaagcctcaaagacacagctggttttccttagaaactccccaccctgtctcccaaagaacagaaggcaaaccaatgtatgaaatagttttccatatctttcttatgtcttgtatctaaccatctagacacccctatatcgtctgtgtggttctttactctgcaagtgaagcaagaatatcttcatttgtagattgctaagccattggtcaggtgcaaggtaataactgactagtgaaagagattgaattgtctaaaattttcaaagttgctctagtctcctacattatctcaaaataccacaggaagtgtcttatgaaacagagaaataatccttaagtttcctatattttttatgtggtataaacatggttggggggttggttttggtcttgtgggtttttaaattaatctttattataaaatgctgcaatttaaaaaaaactcatacaccaaagttatcagatacaaagactatacaactcaataaagcatacactaagggtaaccattcagaatggaagctgtgagcttcacattggattttgtactttcactaagtagtatgtctttatgtatttatccaccacaaaaaccctcaaaattcaaaaccaacttagaactagaaaaacaattagcttcatagtatctttcagaacccctgtccattacctgcattcagtccttccttgtcccctaatatttagcttttcttgttctcatttctaaaatgttatactaaacctagttgtaaacttgttacatgtattattgactagattctgctgatgagggactggtcaaacagtgcaggggaagctgagacctgctgagccacctagaaagaaacgaagattagttgagctacctggaagaggctcagctcagaccagctgagccactgggaaagaatacactccaacctgtggagctgcctgtcgattgagcagtatgcttcaggcttccagcttttgtgagctgtcatgatgctgcagtggctttggtgatgcagctgtctttgagtcatttctgctactataagcaaccactcacccatattcctataaataacccagacaagatgttggttcaccaaggtggactttggtaccactactctgatgtcacttccctttctgggttaagtagacatttggagtgttacacaaaagacatcttgcctcagggctgggtaggtaatcatattttctagccccctgtgtgaagaatagttatggaacagaatggactgaatagttaggagtgggtgatcagcagttgtaaataacactgttacctcttgtggtggatcaaaagaaaatagcacccaaggggagtggcactattaggaggtgtggccttgttagagtaggtgtgatcttgttggaggaagtatatcactgtgggggtggacttagaggtttgttttctcagactgcattcaatgtgaccatcagttgactttctgtcacctacaagccaagatgtagtgctctttggtacagcagcacgtctgcctgcatgctaccatgctccctgtcatgatgataatgaaatgagcctccgaaactataagccgacacttcaattaaaagttttcctttataagagttgctgggatcatggtgtctcttcacagcaataaaaaacaacaacaacaacaaaaaaaaaaccctaactaagacacctctgcactaggaacagatggttatatgtcatgttctttacccattataaatgaaggcattacgtcagcaactctaaaaagagggggaaagcttatgctttcatgatgtaaaaaaagtgagacatcactcctcagatgtcagaaagcactaatggagtatgttggttgagtgcttggccatccccaaagaatactgtcttgaattgtcagccctggcaaatagctctcatgtccaactttcttctgagacttccctatgcatcttgaaagcccattgaaatcaaaactgaataataaaatactgcttaactctaacccttttccttggtatggggagcaaaagtatccttgggtaaatatgtaaggagtggatgaaatcctgagtgagcatgtattattggcaaggagcaatgccttagacccttgggaattggcaaaggctcagaggtatggcaaaacttcctctggtacaagtacagatgtttatgaatgattgcccagtatgtacaaacctgaaactgcagcatcctcctcggggatgattacagtctatgattgctcccctaaagagacctcctaccaaaactagctaactccttctcgggctatatataatagacatgctgaggtcctgagttgttgcatggtagatgctgctccattagagtgagtactgcccactcaatcccaacacttctgaacaggtgtctgatttttcttcattctctcatttcccagtcaggtttccaggaccaagccacgagggacatgatacctttgcttttattttctgcttcctttacttggtttaaaacagcatacaaatctcagagagctctttgctgtaagatgtatgttttatttcattctgaaatatatgcccagggcaaaaacatcagttttcataccttagtcctcattctaacactaccttggcctgtaacctaaactagtccaatctgaacttcaggatctcgggaaaaaaattacttgtgaaatctgatggtaaggttcttagttgttttgtttccagggctaagtatcaggttttgatacctaagttttcaaatttttctagagactgtacatattaaaccatcatctaaagctgaatgtattaggaggaaaattgccttttaaaagatgggaaaaaatgtctcttttcttttttggaacataaagaagtcttctgaggtatctctctcatagaccagttatgtggttatgttcaagagatttctaaaccagctcggccaatttttatttgtatttcatactatttctctggtattttattctgagtttatggaagacattttgcatatttcaactaactctaatattatctatagaagatgatatataggtttataattgagaccataggggaaggggcttcttttgttgttttgttttcattttggcgtttttgtttgttttttgagacagggtttctctgtgtcacagagccctggctgtccttgaattcacttttttagaccaggttggcctacagtgatccacctgcctctgctgggcttaaaggcatgcaccaccacacccagctggagggggcttctgtttgtaaacaagagggtgataaaagagagggaaagagatagaaagaggatgaggaggagaagggagggggaggggagaggagaggagaggagaggaaagaagagaagaggagaggggaggggaggggagaagaggggaggggagtaattcatcctaaaagtttttcaggtaaatctatctttattctcttcttcctaatgctcctataaatatttcagtctactaggtttttctctatgtccatgtctactgcctccttcttccaaatcttctttcagtgttgctttcctactaaataaatgaacctcctctccatcagagtccagagaacttgattttcttacctctaacaatcttccacattacattttgaacaatgcttctctgtcttgttttactctaatgcaggctcatgttcctcagggaaatatcatttataacccatctgtttcacccacatggcatagacttagatctcacctgtggtagaagctaaataactacctgttaaataaagtgcctgccattttgaattctaaatttatgtctttctgcaagatgtgtaaacaaataactgctaggtgttcccatctccactcattctcaatcttcaggattccttcatatccattattgctcattctctgcatctgtcatactttaagtccccaaggaggggggcttagtagtatttttaacctccaagcttttacacacacatacacacacacacacacacacacacacatactcctttacccctttcttcatattcaccaatccaaacttcctcgaacatatttaggagtaatttaaaaaaaaaaaaaacaaataccttccaaatcaacatccagtgttacctaccaatttataaactctttcactgccaactgatagaaacctcagccactggcctaaaagggaaattcattagttccagaggacatgtatactgccagtgttcctggagtggccacactatacaacactccaaggtactgatgcaatttcattcatccttctggccaaacaccaaagacagtcttctactaaatctttcccttgtatttctctcatttccaaaatcatatggtcttatcctaaatcaggaaagttttctgtttcttcatggttttaattcccatttaatcaggaatcattataaattcatcttgacacagagcatgaaagagtgccttgcacaaaatagagtttgaattgagtctcttaaaatccatttggacttatatataaagggcaaaagactgtattcggtatttttctaattctcagtatcatctttcaattctatttcatttcccactcttggaatttaaatgtcactttacaattccccaaagagtgtacctttgctttatagaatgtctcctttattgtccagttttaatttctctttcacctttttcctgccctttctttcagttttgcccatgacttgagaaaaaccagtgtattgccctatcacacaggctatcagttcaaatgctcatggaagtttcttcagtcccaccagccaatgcttcaagaaggttcacagctctagaatgtgttgttacaaactaaacactgcctctccacacatctttcttacttctaacaacacagtaattttaatgctgtgtaaaggcctttgggccactgggaagggaggaagcaataattcatttgccaatgaaaggatccaaaggcagatctggatatttttacagctatagcaaaagatgtagggggaaagcctccatcttctgcttgctctacaatcctctgggacactttatagatttaacacactgtctaacaacattactagttcactaattacctgaaatgattctacacccatacaatgtcctatgaatatgaataaaggagttataactgtttcttagtcttcagttcaaacagatgacaggattagaaaagttgatgtaagggtggatggacaggaatagctaatctttgattgttttgtatgtacttttggtggggggatgaaagggtttatttggcttacagattacagtccatgacccattatcaatggaaaccaagtcagggactcaaggcaagatcttgaagcagaaactacaggggaacattgatcgttggcttgttcccattgtttgctctgctacatttcttatacagcctaggtccacctaccaatggatggtaccacccacagtgggctaggccctcttacgtcaattaccaatcaataaaatgtttcacagacatgcacataggctattccagtggaggaaactcctcaatggaggttccctcttctcaggtgtgtcaagttgtctgttgaagttaactatggcagtatgatccttaaagttgcaaagactagaggacagcatatttttcactgtgccaaattaccttatcatggttagggcagaccaccaagatatgatgcatgatgttttaaaagtagaactgaagcagtaacctcattatttggctctgttggacttcccatgatgacctgtattctggaatgatctggttcacctaatgtgcatggggaagcaaccaggttcaggccctcagctaccactctgttacaataaatctttccaccaaaagcctccgagccccactgccacatgtgagctttacgccagccgcctgcccgagttaggcccaaatgaatacacagaaacttgtattaggttcaaagctgcttggccaatgactaggattcctcatctgttagctcagtcttaattatcataaatctatatattttataagacttatcttattggctgtcttgttgacatcttcccttgccagtggatcacatcctgctgctggaggaggcaaagggaaaaaagggcccttcctgtttctccttcgcttaaatatgagtctccttgctatgtcacttcctgcctggatcaccatttctctactacagttcccagaatcctttttgacttctagtcccatctaacttgctgtctcattggccaaacaatattttatttaactatcaataagataaacatacacagtacattccccatcactctaactctttaagcttatctaattctatgccaatggcttgttctactcttcagtgaagtgtgccagtctttcttcaggtcaacaagaccaaagctgaagtttttgtttgttcttttttgctgttgtttatgttcaatggctctgtttttctgatcaaatcccaaaccacaaggattcaatgaaatgagctagaaatgctgggtgaagcctaattaggtcctgggttaagtcagttggaataatgaattataaatatcaaggtgaagattctcccaagtgaaaggatatttaatatgtccaacctctaacctctaaagcatctctggagtggtgagtagcagacgagggccctcttgcatgtgattactctgttagaagagatccaaaattcttttaccccagttaccctgagagggcatggcaagatgtcatctatgaatgaggaaacagatcctctctagataccacattctccaatgccttcatccagtctccaatgcagaaattgtggtatttctgttggttatgagtcacttggtgaaggcactttgttatggcagcctacacggacagcaaacattcggatcttcaagtagatctttgcaaaacatattgcagtgcattagagatgagtagggaaacaggaggagccagggtaatatgaatgacagtcctaaacagaaaccatgaggcagcgacaaagtcacagtgccaaacagcacctatccaaaacaaaaagcaaaacctcttctgtgtgaagtacccagctatgagaagaaagagctgaagatgtaatgcaacatctccattactatctcccttcattcatagtcatggagggtatgcaaatagtaagccaaatactaatctacattatgttattattatcagctgaattaattttctctcaggacctagtataatataagtcaagagtagttgtgtgtaaataaatctcttaataatgatgtaggtaataagaaatacctgccttattcacacctctgtcctattattaatctgtggttatgtaattaatacagaagaataacagagtcccgagactggaaatcaggttttctttgatatatcgtgatgtcactgatgcttcactgctcagcaaaaggaaatttattttatttcttcggtgaagcatatcataatacatttatttcatcattttcttaccacccttacaaagccaacaggagatacttatattttgtagttacatgaataagataactgagccattgcttgttagaggtagaaagccagctgtgatgtcaaacagcctagctctgatgcttccattgtagggaatagtcattaagactggtcattcctccaacacttaatttccaccccatccccactttagtctttgagtggttatggttacaggttataccaccatacatggctaaacacaagtacatttttatgcaatataaattacatttcaaatttcaataagttatggaaagaaggaaggaaggaaggaataaagaaggggagggaagacaaaagggaggtgggacaagaaaacagagacagaaatctcactcagagcaaagttggtaaatttcccagtgtagggcctcatagatgaaggcaataagaggagttgcctgtggctgctttctagtctttttggttgtgaacctaacttctacttgctgagatgtttctctaggcagggatttttcattttgttttgtttctttaaagcagggtatcactgtgtctcaattggcctggaattcactttgcagaccaggctggccttaaattcctagagatccacttgcctctgcctctgagtgctgggattaaaggcatgtgccacaatggctggctggatcttctggctctgtgtctgctttcttacctgaagcctgtgtttggggatgagtgaagactgggagttacctaaactgtattgaagccagaaaagctttcttcaccggcagtgaaaaagcactctctactctctgttttcctataaatatcctacctaaattcattcctggggcacatgttaatggaaccaagatgaaaaccaaaggcatttctgcaaatcctttgaatcttttgaatcaaaaaaatgagccaattaaagttgcttgacttgtctgacaaatgcctaaacgaaaatggaaggaggagagagatccagggagtatcttaataaatgatgtactggaacacagaaccatccatggctagtttcagaaaaatggagtgttgagtgctcctatgaacccaggacttcaagatgatttgggtgcttctatttatttaattatttaggattaaattaggtgaactctctaagcatcccttctgtgggtggaaacaaacctgtaaaagcatgaagaaacttcagtggagcaacaaggctgtatcactcagggggaaatgattgatttcacttgaacactgccaacaacaaaaaaatgtttaaaaacagtttcacggctcaactttcttcttgctgtttttttttcttcttcttatagttggaatgtattttatcgtctgtcagttttgccctgtgatatgtcctcttaaattggatctgtaagcccttcataaagtttaataaatcttcagcatttcaccctaaggaaattatattaaaaaccttcaaatgtgaagttgggcccgcagacacacagcactgggaattttatcaccataatcagcgtgtaatgaaagcctctgtcgctgctccttcccaatcataatctgcctgtctttatgaaagaaagggggggtttgtctgggttcatctgcaagctttaattggaagatgtcttcatttcattcctgcctactgggataataactcagccccatgtttaaacacaggccctcgccgctgatattttttcatttagtaaagcatgtctctttaaatgatttagcaaatcatcatgaatgccaggccagagtgattggcagctcattgctggtgcaccatttgcatgacatttgttcttcagctaagaaagctgccgcaggtaaacaagcaggccctggactgactcccttccagtccctccctgtttattttctcataatcaaatgacatttatgagaggccaatgcagctgcacatatatgcgggaaatgcaatcaggctaaacatgatgacttcattcaggtgatattttgattaatgaaaggacatttttatgacatggggtttttttgatgaagcaatctggcaaattcccttttgtgtaactaatattctatattttatctatattttaatgcagtctgtactggaataattagttgactagtgtgcacttaagagacttttattaaaacatggaaatgattcaaacaggaggtccaaggtaatctttttcatcccttttggaagaaaacagcctttctctcttcaaaggcaaagagagaaagagggagagaaacaaaacaaaacaaaacaccaagtgggtgtgaactaaagctagttatgacatctgtgaatatagtgttccctgaggagactcctgagagttaaaagtttttatatattttctcactcattgccctgctaagtaacatcgacaataacaaattagctggctttcttcttctttaaaacaaaagttaatagtatcataaaataccttcataatttatgtgccttcacagaatcccaagagcaagctatgctttcttgagcttgctagaaatacaggtatgctgctttatggcgaggtatttcttcactcctagaaacagctccctgcagtagggcagagaatttgtctccagtggcactcagttcagcctagcagaggcgaaggcagatgtggtctggcaggcccaccccatgataaaggtatactttcacattcagctggccagccttaaaagaagacctcagagaccccaaacatctttacccactaaaacaaaaacctaagaacaatgtcgtcctcccagttattttcctacggaaagagaaaggagaaacatggcttttgtgatgataaaaggtaattctgggcaaccctttccttttccattcttgatacaggatcttactacatattcctggttggcctggagacatctgcctctcaaatactgggatcacatcttattcttcctgttggggaggacaacttaaaccctttgatttagttggggaaacgattatgcattaaagctgctggcacatagaacacaatttggggagcatcacaggtcagaagtagggtgcagttagtgtggtaaggcatggctctaggagatatgaaatcaaggttcttaagaaaacaatcatcccaaccatgccattgccttgcactcactggttcagtcattgaatctacatttgacaatagcaggcaggtaaggaaagcaaaaactgcaaggcaatatgtgattaaaagaagcgcagagcaggtgtgggtggcacatcaaaattaccctcatgtgtcaagaaacccttcatactagagaacatttgagttgagtctcaaagtgtaaattaatctccttactacttcataatcataaaagttttgcatatatggccattcttcatctgttgtatccaaagtaatacaatattagacgtttagaaacaaaacctgacatttctgatttgaactatttctgcataatgtgtcaaacaactccaaaaccctcaaaacttacatttgaagcatgtggtatattgaaaatgagtcttgcatcttcaacttccatttcagtgtctatgtattactcattgtagcttatatttccagtgtaatcagctaagcaatagctacttgtagtgttagaacttgtaatatcgaagcagggcttcaagttaccccatcttaggaaagccttaagcgtctgccagttgttcctagaatttgttttccctcaactaacactagatcttagaatattctgaaaaacaagtacacttacaagttaatatgatgtccccatcaatattcctaacatcccttctactataccacccacctcagaacccacacttcccctatagccataagaaccagagaactggaatagaatcagtctaaactaagaatggattctggctgaatggagaaaggattaggaaaaaagtttaaggacaaaatgtaatttatctttctactatacaaatatcaaataattcaacacagaaactgtataacttctacttgaaactaaaaatgtgtttcaataggtaaactcttacacataaaatcaaaaggctaatatttagattttcattttattatttttcatgttatcttagtttagtctcatttacattgttcctttatctataaaaacatgaataattatgctttcttcacacacataaaccatgtactttatgcctgttgtaaattccctctctgttgctctataccacacacacacacacacacacacacacacacacacacacacacactgagaagacatatgtatgaataatccatacttcatacaatgaggccaggctaaatcaactatgatgtgaacagcactttagagttcttcaatatggtgaccatgaatgaacaaataggaaaatgacattttctagtgactttccggccttaattgtagtctctgagcataactttaattatagtctcgaggataaccaatgaaaaactaagatcaaacatgattttgttaatgtactaagttatatatgtatagaacttcatgattgtgctaaaataaaaaagaattgccttggatcttgtaggtggcctctttagcatacagtctatctcaagactgagaaatgaattatgtcattgagtgtgctattgttagaaggaaataggaggaggtcttcctagagcttaatgcttggggttgattaaccacatagcagctctactaagaagtgtaagtagaagactacacaataaaatagctaaagtttatggtgttggcccacaaaagatctcaggtagtatctatcttgtcccatccaactctaccattctccatttatagagcttgggaaaataggtgtgaaaactgctgcccatgggcttaatgaggacagttctatccatacctgcacaaccccaacagtggtcaattaattggattaagtaagagaagaaaattccttctccagtgatcaaagcaagggacgttaaccataaactcaatagctggtgttgagccaaagaacagggccactgttctgcagcttcccggggcaaggaagtagtggctatttactttgctggagagggttgctatggggcatcttaagtctgagtaagagagtcactggacatcagtagagggtgctgggctaatcattgtgtttccagcagttggaagaattaaactggaatggagatgtattcttcctcattaagtgaatttcaggtaaggtattcttaacaaagtggagaatgattcagggcagagactgacaatcatgctctgtttctatgaaaaagacatgaagttggatgagttataaaagaaaagggtgatttttctcatggttttgcaagcctaagaataaggaggcatccccttggcttttggtgaggtattctgtgtatgtcagagaagcagaaaggaagcaggggtacatgtgtggaaggaggcttcaggggcttcggaaggagccagactttctttataccaactttctttccaggcaaccattccaatcctgatagcaagaactcattgtcatagagatgtatgtatccttcttaatgacctaaccatcatgttaagatcttaccagtcctctacacttacactaggtaccaagcttcaatgtgtcccttgaagagctcataaaaccttccatcataggttaagtcatctttgagtgtccataaaaccagaaaatactgcccctggatgaaatggctgtacccattaagtctcactcctgactttctacatgttttcgtaccacaactcatcactcagaagcaacttagaaacaaagaatctgttaatatgctagactggggggagggagctgtcatttctccctcactctgttaactcatggcttccagtgtggagcaggtcggattgcacgaagaagggagtttctagttgtacagttcaagctgcaaaacaaagtggattttatgtttgctcaactgtctaatgacataaagttagtagagtacactgtgtcgctcaagagttgaagaccgtctttgtctgagatcaagaactaacctgaaacatcagagttcagaggacaatgagaaagcaaataaagttacttaggtcaacttgtgttgaccaaactcatttaaggtccaactgtcaggtgatgctttaatccattcattgtgcacagtgataagttgtgtatcagtttaggaaagaggaattatgtccagttctccaaacctaacagagagcacacccatctcttttccagcccagtatggaaaacacatttaatggtgtcattgaaaacttcagattaagttgaaagaggaatgaatgaagtgcagtagccagctaacacagattaagagtttctacaagcacatgactatgtgccttggagcatcctttggggtgctccaatttccttcatgagtacacattcttttactcaaatccaaggttatgctataatataaatccagaatacttcctgagctgtaccaaagtacaagagtgtttgatatagacatcattgtgattggtacaaatctttctttatgtttaagaaaagatttcagaccatctgcaccatgtggttgtaaaggccagaaacaggatttctcacaagacaggtacccttcatccaacagctgatacttgacatttccatggcaaagagtcgtcatttattctagtcacatgaggcctgattgatgcacccacatacagattcaactgcttcttaagttaataatacagatcaggctgggttgtggtggtacatgcctttaattccagtgcttaggaggcagaggcaggcagattatctttgagttcaaggccagcctgctccacagagtgagttccagacagctagagctacatagagaaaccttctctcaaacaccaccctgcccctgcaaaaaaagaaagaaagaaaatgaaacaaaacaaaggagaccatttcctaagactggatttaagagtaaatgtgagataacctagggaagaagaaagtgcagggcatatagagagacagacaggatgggcaagctccctatgtttcagattctgtttctgtggggaattaggagcacgaggctctcagacaccatttttggccactgagttacagagtgctcatgctggcaagtgtgacatgttgtgaagtttaaattctttggcatgataaagatggtagacttctttattcagtctaacactctgtatttcccaggcatataacttttaaactgatagactatgctctcactagcttgtcacaccttggggaatcagttttgtcaaaactggacttcacagattccaagaggaatgatttctggaatatatgtccaggtgggaatgacacatgcaagtttgatttccatcagcattcactttctttccagttttcaattacagcatgctgttgtttcctttgaataactctgaattctttctcataatgagaaaaaagttagttttaattactatataattattgctattagtatgtaaaaataactgtaattctcaattacgacactcctagtacacttgacaccagatatttctcaaaaaaagagaatttcataagaataattttatatcattccattttcatatagtattattattaaagatgtctttagaaaaagtattatttttagagaattgactcagcgatattgattttctagtacataaaagtgaacagaagtctcagtgtaaatgaatataattttttaaagctgctagaattataaaaatgcttacttcctgcagattatacatctaataaaaataaaccaaacagccaatcgtgcatatggttgataaaagagcaaaaatgacacatcttcctcctgtgaatttgatttttttctgggagaagcaggacataggagggaagtcccggcaatgttatgatacatattccaataacctgctatagttgctcccttgagcagaagagatggagaacgaatgccggcagagggcccgagggtgaacacatgccaatgtctggtcagagttttatccttatccttcttcccattatttcaggctcctctgggcatttccagggtcctacactcccctcttcctttctgggcaaaagttcaaaatgccaagttctagatattcacatatgtaaaaatctatattcctgtgttgcatattttcagcccagaaagtatgaaaaccctcagatgtcaagcccgcatagctccactctaggaaaagtctaagaaaattgcatgtgtgcagatagtttctaaaccaactgcttttgtgcattaaaatatccaatgttttagttgctgttgaagactccctatgtctagaaaggatggatcagcacccacagtgtgtaccagtcagtgtcaggcaagaaaagcctggccattgatagtctcttcatcttctgtgcccagtgcctcatcccctggagacatttgccctttggtctgaagacattttttactgtctaaactgaggggactatgtagcatcacttccaacagtaaagggtgcctggtcccaaatatcaagaacacctaggctgagagatcaaatcatagctcacacatgacccagttcgaactcaggtaatctgccagcccttgtagaccgttggcattgtaattctcagctatctgtgcttattggatacataaatgcagtcatatgcaatcagaaagatcaaaatgatttatgtagctgagactgctatcaattgggttaccaattgttaagtcatatgaagcatatatctgaaggcccagcaggggcctttcctgttctgatcagcacctgcctgtgcctcacataggaaagaaaagttgacaaactggcaaactctggtccagactccctttgaagattggccgatccaagctcagaatatttagtacagtgtacctctgatgttttcaaaggatcatattctctcatgttcctcacatcttttggtcctagactttttaaaaaatgctggcgcgctaacaaccttggaagatagagatagggtctcttctggagcagagggtaggtgtgcctacttcacatcataaggttcttacccagggacacagcctgatgtatgcaacatcctcctgaacaatccactttatcctagtactagtgagtttggagacaaagtgtgtggcccaggatccagaactctggagtcttctgctaggatgtcaggaatgagcagggaagaattgttctctcctggcaagaacaccagtgagccttctagaggtttattaacctcttactatgtcagctgctttttaaatcatgaactgttctttaccctgtttagggaacatgtgtaccctccttatgtaatgactaactctggcagcaggcagttggctttaaagacacaatagtgttgccctgccagtattggcctttctggagttcacttggctacagtcttagttttgccatacctaatgtcatacatacataatgtcagccacaaccctgctgctctctcgctccctcctttcctttcccaatgtaagtgctgtctatcatccatatgcttaagaaatatcatatatgtatgttttctgagagccatgcaggtacacagaagtcagagggaactttgtgggatttggttctctccttcaaccaggtgggttgtcaaggtcttactgaggtcatcgagtttggcaatgagtgctttaatcctctgagttatcctgaaggctccgtacacttctttctttgccctaaatccacatattattccttgtggttagtggagaaatgtgaaccattaaatctaaaatgtaaacatacaaggttgcctcatgagcagtttttacaaagcatgagctgtgcagctacagggaaggacctagcggatgccaactccacctgctgattttctcacaactgtcacacattcccatggctcctttcatgacttctacaagttctgttttggggtccttgtgcttcttatcagaggtttctacaaagaagaagggtgatttttaaattttatttttattttatttttgtcactgggtttccttgtgcagcccaggctggcctggagctcactatgtagcccaggctggcctggagctcactatgtagcccaggctggcctggagtgtgcagtgatcatttctcttctacctcctccccagtgctgggattgcaggaacagtcataagctgtcaaaagtgggatctttaaaatttttctattagcatatataattatacctaacaatgggtttcattatggcatttttatacaagtacataatgtattttggtcacattgatccccattctcctcttctgcctccaatccggttactcctcttcctcaagcaagttatatatttagatttttgaaattaaaatataattacataatctctcccttctctttcctcccttcaactcttactatgtactccccagctctttctccagtttatgacctctgacttctttctctttaactgttgttacatagatacataatacataaatagaaccttgctatcccatttagtgttactcgtatgtacatgatctcagagatgactgcttggtattggataaccaaataaggggctcttccctgaaggagactatttcttcaactctcagcattccttagttgcctgtagatctttgtttaggagtaaggccctatgagcgttcctcctctcatgttaaaatatctgttgttgtcatccttcttcaggtcatgtttagacagccatgttgtagaggcatcaggggcatagcttccctgtcattgctaggagacacaatctcctgataatcctccccctcaaacaagatatttttaacttctgaaaatgtcctatgtagttgaggaaacaaagagtctctaagttcatctttgggcttcttctcttgtagttaagctttatgattatgaggtttttttttctggggataatgttacattctgctgtaagatttagagttttgtgttataggaatctctttgaagggtgtttgcttattttgttttagggaacagttagtgagtaggggaaattactagtgatctgtggggggcttgagagatggctcagcaggtaagaacactgactgctcttctagaggacccacgttcaattcccaacacccacatgacagctaacaactgtctgtaactccaggatctgacatcctcacacagacatgcatgcaggcaaaacaccaatgcacgtaagataaaagttaataaattatgttttaaaaaagaatggcctgtgatggacctttcattttatgctgtgtaaaacctgaagcttcctcatatcatgtttatgccccactatcagaggtcagatataagtcactgcagtcaaaaggctctatgactgtatgtacatgaagttccgttatttctcatactccagttttataacaccttcatcgataatattaattcctcatcccattcttttccaagtagtctgggtaagctgtcaataaaaccaggaagaaagtcaacaaataaatatacagcagagaaatctctttacagtgtacatggtctttgtatatttggttggcactagtctttggaatgggagaaaggtgtgagtaaaatgtggctttgtgtatatgcccttatttctattctgtctacctgaacctatattcctatatctataaatgtctgtctgcagaagtataattgtaagattcaagaacaaatataggagagtgaagcccttagtgcagttcctggtgccacaaagaaaattcactcaactctacttttgtccttggttagtgtggcagagagtacgaaaggtcaggaaatgaccctgaaaattatgtgttgctttttgctttggggagtcctaattttttctgattattatcagaagagcatctgagaacccatggaaactttgcctggtgcttgtaaaaagcctacatttcgtcagctgctgcctttctgacctgacttttgcttaagatttacctacacagcttagccaccaccacattcagagtgccactgatgtccccaaaaactgaccgaagaaaggttttctgcttccctgggcaaggtagttgggacaacttccatttggcttttgtatagaataaattatacctttctccctaatttcagggtttttaaaaaatgcttagaatgcaaatgttgggctgggagtgtaggacagaggtagagcatttgcctagcaaccgtagactatggactaagtccatacacccttcactgcctcagcttttagcacttatatccaatgtcattatagcttatagcttgattgtgatttattcttaaaacatctggaatgtctagtcttgtgcagagatcagtgtatggatacaaggcagttaaccacagagactgaagacatcacaagtttggaatatagaaggtcccctggagcttctctttcttcagcttgacaatgagttaatcagatcttggtcgctctgaacagctaaaaaatctggcaaatacagttacatttataacaaatatgttatatattcaagttttcagagcagtactgggcccataggagatatgcattgactattaaatgattgcaataaggaatatattttaatagaggaaagcacatctcaaaagttacttgatttcatatgttagtaataattaaggaacaacttttattattgctttttaaccgtccctgttaaatacctttttggacataataattcattaaggtaataaagactctacctttggtaagaataaatctataacaaaatctacagagaagatttagtaagaaacaaaactaaactttatatttcttattaaatacggaagatgcaaggccattaattcgacttccacaatgccagaaagtgagagaaaatagacaagtgaaaataagatgaaactccaggacagtggaagatgggaagttaacatatgaaagatgtcatccccatttctcagacacctggacacaagcatggaagaggccacaagaagtcaagcactttgggtagaagccttaggaagaagtagcaagcagctagcaagagtgctggtgcctctgcgaaaccagaactgcaaatagggataataactggagggttttttgtaaaattagttaataaatagctgataccttattctatgaaaacattggcaggcatacaccctgtacatcggcagaaagctccacacacagagggtcccccatgtagctagtatccctgtcatcctgaattttttagtagattttgaacttgtagcagatattttcattttgccctgggctaacaaaaacaaacaaataaacaaacaataaaagccaattcagcttaaatctctcccactaaaccacaagatcagactgaagggtaagaggtttgagcttttttaaattttaattagaaagaaaattattttgcctgtcaatcccaggtcccttttcctcccctcctcccctgcccacccaactaacaccctacctatcccatacctgctcccaagggagggtgaggccttccatgggggtgtcttaaaaatctgtcttattctttgggatagggcctagaccaactaactccctgtgtctaggctcagggagtatccctccaagtgggatgggctcccagagtccattcctgtgctagggataagtactgatccactgcaagaggtcctatagatttccaaggtctcctcactgacacccacattcagggggtctggatcagtcccttgctgatttcccaggtatcagtctggggaccaagagctctcccttgttcaggtcatctgtttctttgtgtttcaccagcctggtgtggacctgtttgctcatcagtccttctctgcaactggattccagttcagttcaaggtttagctgtgggtgtctgcttctgcttccaccagctgctggatgaagcctataagatggcatatgaattagtcatcaatctcattatcaggagagggcattttaggtagcctctcttctgttgcttagattgttagttagtgtcatctttgtagctctccagacatttccctagtgcctgatttctctttaaacctataatgtctccctctattatattatctcctatcttgctctcttctgtgaccagcctacagtccacactgccagagaagctagtaaataaggaggaccctaagggagacatacatggtcccctggagaagcagaaagggacaagatctcctgagcaaattgggagcatgggagggggggtaggagaatgagaaggggagaagaggaggggtgaggaagatgatggggcagggaggttgagttgagggaagaacagaagaggtctgagctttaagaacgctgaagtggtaatagagacttgcgaaccccaggcacaggtgaaacaagagagtaggtgactgtcaagaagacagcaactgtgcttgtagcaccaccaccaccacagagaagggtggcagtcaaccttagacttccaagcagacttccagattcttctcagagtaaatacaccagactgaaaaagagcagctggagaacttttaagaattgtgggactagagatgtggctcagcaattaggactactggctgctcctccagaggatctagaattcctaacacccatatggctgctcacaaagtctctggcttcaattcagtggatctgactccagggcactgtgtgcgtgctgtgcagaggagacatacatgcaggcaaaacaacacatacacataaaacaataaaaaatatttttttagaaataagtaattcctgtaaaatatctgacaagctcttatcataacagactttctaaccaactttgattgcctcaactagaagtggaagagatcatggttagcagatattttaggaagccagaaacataacaatgaaagtgagcaaggagagagaaaagactctgagaaacttgagttgaaaggaagaaagaaagaaagaaagaaagaaagaaagaaagaaaggaaggaaggaaggaaggaaggaaggaaggaaggaaggaaggaagacattaaaataagctatcaaaataataaacataatgccagttttttattaaaaagtaatattcataaaaatttcataaagaaaactatcaaaattaaacatgtatatagctaactagtaaaccattaatttttggaagataaggtgattctgggttgttctacaatcagaaagcagaaaaaacttaaggagcctaaacaaagaagtgggaaatcaaatataagtatattaattagtctgtccaaagattcaaaatgtaaataaaaaaaaacttccagagaaacaaaaaaaacataagagaagaaatgtttagtggagaacacctatgctcaaactttagaataagaggtataaatcttcagattaagggtaacctcatcagtattatggaatttcagaagctatggctaaagagtaattgccaaatatgccaaagctgaagaattccaaacatagtagaaaagattagatgttaatatggtggccagtttctccgaagcaaagttgaaggcacaagataaagagatgaagcaattactaactctagcaaaatacaaaaaaaatcttcaaaaactgtttattgtgttgcaaagatcaacctacatctaacacttgcagagccataaccaggccaccactagtcactgtagaaattgtgatgtcactgcacaggctggagggaacaggtgtacttttctggattctgagtatggcaaataagcaatgagaaaatatcaaaactgggttggcatggcagctctgtgggtaaaggcacttactgccaaacctgaagacctgagttcaattcctagaactaacatggtgtgagaagagaactaaatcctgcaagttttgacacctgaatgcatgccatggcacatatatgcccaccacccatagaaaatttaaagaaaatatcaaaatgaaatgaaattgtcatttagtaatatggaggccaataacagaaaaaaattcaaagggagtaatggcaacctgccagagacagaaatcaaaaaataaagaaagggacagcaaaaagatgccaattcttttgagccttgaaaagctgcaagacatttaaaattatgtacgtgtgtgtttgtgcgtgtgtgtgtgtgtgtgtgtgtgtgtgtgtgtgtgtgtgtgtgtgtgatcaaaaaataaatttaaattatatatctgcaagttacatatactagaaatttttcattataattattcaatttcctaatggcaatgattgaagtaatgagaaaaattgttttaattgaggacattattagtgagttgctattaatgatttcatataaaggatttggggtcatgaagcatccacatgtgctcaggagagtggcctgaagatcatggcatgttgaagagtcacaaattgatgtacgctgatgtagccagggtcatcccaggcttcggaggaccactctaaaccacaaagccccagggaaactagaccagcaaaggtgagccaatgtgctactgtgacacagagacagatttaatagcgattggaaagtggcaaaaacaagagcaaaggaaattctgtgcatgaccaaagtgagagatggaagcactgagaaaagcagtttacaaagcaagccccaagcaggtgccttattgtaggaaagtcagcctggtgtgagagaagagttgagcacaaaaaaaaaaaaaaaaaaaaaaactgacctctgggaggtggttggtttcccaggcaggcagttccgagaggcacccctaggtgttgagatggatggatagactggggtaagaagtcaccaacttccacccaagactctgttctcactacagctgcaagtaaaccagatctaaggctgcaggaaaaactgctttcttttggcttgttggttggtctgtgacaccatctctcactatgtagattcacttggccttgaacttctgaacatcctgcctccatttccaggtgctgagattataaacacaagcccccaggtccagcttccaggaaagatttctggcagaaccaagttgagaaaataacaacttactgacactccctcctcaggttctttactctatagctatagaaacgtggtcttacaattggttattggtggtagataacaacaataaaaattgatgaggaatcaggaccagcagccaggcaaatgagatgctaaccaatttcttttctcccacataaacaaccctggcaatggtctctctgtcaaagtaaatgtactttattaaacactgtgttagttactgctataacttcatttcttaagaatgaaagcatgaaatttagcacattattcagcaagatatgtgcacatccttagctgtaacttacttattagtagacattactccctttgaactgtggcttatccgtcccatctacaaggtgagatgctgtgcagaatagagaaatccatcacttggttccaacactgtagcttaagggttcacagaggtaaaactttgtctcgttggtgcctactggcttcttggtacatgaaccctgtcactcaactaccattccttatacctgctcaccccactcaccccacccccaccccccactgcaccattctacagttcctgaggtaactggccaactttgcctaccagctttttgattgatgtacccacaatttttccttccctgcttcctctctctgagaaaaaaaaaaagactgtgactttcttaaccagaaatattttattcttaacaaccataattatgtcaccccctgcagctaactttaagctcactatgttgactatccaagcaaataagttaatttgcatcaggaagttaaaataatccaattactgttactctatcaaagatctctcagagaaaatagcttagtaatcttttaccccctatcttaatatttttaagacaccgaaagagagaagactattaaaaagaaaaaaaaacatatctcttctatagggatctctttacgggaggcttgtcatgtgtttaaatggatgtaccagataattatgttggttgcagcatgcagaacaggataaagaggggaaatggaatttgacaaaatgatgaatattctacatcaaagccatccatgttaatataaataagtcatgtggtatcaggtaagaaggaaatgccagaagccgcttcacattgccaggtgcttcaagcctgtgcctgtgagattttactctgatgctccaccttggaaaagatattaacctcacaaatctgcatgggatggtaggtgtacacatttagacctgaactgatgacctcatcaaggacaacacaacagtgccctagagatgacctgaaacatttgctttcctaaacgaaaagcactacagatggtgttctggtattacagatagccctaggaacatttgatcattgacggacgtccatcttaaaagaaaggattagccaacagacaatgataacctaccaaatgctgcaccaaaacatgcagataattaaaaggtggattttgagaaataaatacatttgttcatggggggggaagtatcttaaagtacatccttattgttaggttgtatgttttagtaatgattaggtgttcctcagcacggatccaaaataactttaagttttctggaaaaacaattattataattaccttaataaaaatccgaggaaattaaacctcagtggaaatttgctagtttccttgaggaaagaagatcttcatgtggggatttgaacaagctggggaatgatctacctggcttccttttcttcctgctgaccagctgcaggacctgagtgtgctgcaaacaggaagagttaacggtgctcactcctaatcggggtgctgggagtgctttctttcataaagtgcatctgcatgacttcatattctttctaataaagttgcaatattaaacattatgtgtgacaatattcatctgtattcaacttctttgaaagggcacttgcttagggtttctttgttgactttggaataaaaaaaaaaaaaaaaaaaaacaggcagttgccactaatgtatttttaacagaaacacattatatatagccagggtgaagaaaggaaaatggacctttgctctgagctaccaggtctttgcactaagattcggggtcactgtgtgtgtgaacatcgaagcagaacttctcttcagtattatttctcagcagtattacccagaaattctctctgctccaactgtacttgggactccatggctccttttaaactattttttttcctttctatttgctaggacctagagaaacagaacaattggggaactgttcagagagttgatcacatctgactgctcacagcttctaaaagctgatgaggaaatctttgaatggctcttgtccttgactctggcactgaagcttcaagtccacaggctccacaacacatcacacagaccaggaggcttagaaggagaggaatggcattggctcacagctgaggagctgaatccaaagtcaaagactccagaagaggtatttcactctgaagactgtaggagacaaggggcaccccaccttgcttcttgtgcctcatcaacagctgttgacatctcttggcttgtggttatctctcttgttatctaccttcatgtgataatctcccccacgccatctctttgtacatgactttatgttcagatatccctgtttgtaaaggcatatatatatatatataatatatatatatatatatatatatatttctgtctgcacatgttcctgcaggccagaagagggcacctgatcttgttacagatggtgtgagtcaccatatggttgctgagaattgaactcaggacctccagaagaacagtcagtgttcttaaccactgagccattggagctagcttcttgacttcattttactgattgcctgtgtaaagactttgaagtcacattctgaagttccacggtaaggctcactatgccttcctgtgtggatataatttactatgttctcctgtgtggagagcaaggagaagttgaacaagaagcatgaactgaaagacatagatgtggattgaacacatgctgcttcttccttgcttatgagagatcatggaagggaaaatccactccattatcaagtcagtcagttatctggtacaaaagccaaagaagctgaagggactcaaggggacaagaggcagacgctgcccgaccatgatacaagcctatgaattaccattcctagtgttccctctctgcctccttgcagatcaagacggaagctgtaggctgatcctgctctcatgcttttgttccactatcatggactctaagcctctggaaccacaagtcaaattaaacattttcttttgtaagttgccctggccatggtattttgtcacagtgatggaaaagtaattaatacagatgtcttttataacacacagttcttctagtgcaacactaatacagttcacaaacactccaacccatgacttaattcccccttaaaggccctgcctcacagtagcatcacctcaagctgattattttaatagataagtcataaagcccataagcatttagaccattgttcattcatctagctaactaaatgatctaccactaaaatttcctttgtgaagcaaacttattgctaaccaacaaggaaaggatttgaggaccatcaaaaatgtaaggtattgagaggttgtattccattgaattttgtgaatttaaaaacaacaaaaaaatcctacatttcctttattaattatcttattagcaaggaaggaaatggagtaaatgatcaggatgatcataacacagagctgagtttaaaacgttaccttgccccttagcaacatagaacttctctctattgaatttccagtcgtaacaagggggataatctttgtagtagctctcagagtctgtaaggatgaaaggcatcagaggaaggtgacatgaagcttggtatgtgatgagaatagatgccatgttgtatagtgggaaattaccaatacggagtcaggtagaaatatatgggtatttaatagggaaaagtcttacttacagagcgacctagccagccggcgtggcagcagtctgtatgtaagcccaaaagagaaaccgaaagcacaaacgcagtcacactatgtcactctgaccacgccctcacaagcatggtcaggcacacctgtagccagcccctaagaaggcgtggctacagcttcccctacaattccccttttagtctaaaagaggattaaaacttaacagtataaagtatccaaaattaacaatcacaatgttgatttattatctctcttctgcttttacctgggaatcttaatctcattgataaaagagtttaaaaatttaccagagtttgagagaaaaataactaagcaggcaagctgcaaaccttggcagctgggaggaaggagatgggtaagaggacaagagataggccttttatgttaaggtctgagcaagtagataggttcagtgatggaggttggcaaacagctacaggagtaggggttttcttcagagaaagaataagaatttcaaacgtgtcagggcaagcatgctcttgagttctcttggtatccaaaggaaatacagaaaaagaaaaagggattgacttagaattcagaagagtgggcaggcttagcagtgaagacctgtaagttgttgccctgagggagggactcctgaaggtatatgtatgttgtcccattagctgggtaattacttctcccatctatctctttagcatgtcttctaatgaatcacctttcttgaggggttgtattctggccagaagactgacaggccagatggattaacaatagtataaaatgttctgatccctggggcagatcagaatgtctttacatagggccagatgcagagctcagattccattattttgactgggaggaagtaacacttaatgggcctcaacaaagtcagggtatttattcacatcctagctggaaggtgaagtccaaagttgatgctaaggaaggagtctatcctcaagggcctccaagcctgctaagggctatcttgctgcctagccttgccaaacattaagtcttatagtaagtttttagaaattgtctccactaaagactctgagtctaaaaggcaactatgaaatttaggctgccactaccaccttctcctcctccacttcttccttcttctcctgctcctgagatgggtgtagtcacctgtttacctttgcagtactactaggtgttaatcgatgagaagggtaagcaagatccattgaactccaactgatacttcaacagggcttcaggccaatccagaaaaagacattgagatctgtatgcctccattggactgataaaaatagtgtctgagagactcattgaagaaagtgtctccctgaccccacttttgcaaacagcaattgcaatccttaccccaacccagggagctttgtttttttctctcaatatccttaattcagcacaatgcagttactaatgatgaatcttcatcctcctaatgacttaagaagaaaggtctctcaagagaaccttgaggtaggtgagcatagagacttcccaaagacattaataaaagtgtttgcttctccttttataattataccaccacctcccctccagtaggtaatgtggagtctagtacttcatggtagatggagatttatacaatgctgacttaccagttttgggtccaagaacagtcagggcaagttattaacaacagtacagatagtcagagtgacagcaggatggtaaggcttaggcccagtgccacagacagatggcatggcagagtctctgaagagaggcatcagaacctgtgtggaagaaatgggagagcactctacagcaggaacctgcaaccaggctctctgactttcaggaaggaagcagagaaaggagtaaggatgaggacatgacatgccagtgtcaccaatgccccctttggggttaaggtatttcccaggcgagatatcctggcaccaggattgtcaagattgttccacagggactcacagtgtctctctatggtgtctatgtatccgaggaaaggagagtgaaggctactgcagatactgtggcctgactagaagctacactctaagattacactcttactgataccagcgagcactggagatccagagtaggaagtttacaaaaagcatctttacaagaacttgaaaatgggcatgttgatttgcaaaaatatcaagtatgggaaaatgttccaattaaatatactctgtgataaatacaaattctgggttacttaaagcggtgcttaaaaatctctttggcagaatctcaatagcaaaattcagctgtcatggattttctccttctacaaacagatgatcgatctctggattttccttctccatgtttgtgtatctttcttctcgtggttcatgttcaagccctctcctttggtcccatgctatctcatttcatgagtcacacctgtcttcatgtactcacctgagtaagagccacttaccagaactctatgtgtgttgtagttgtcttatctctttatcttgtaaacatcacataagtagagaagtatgttaaattctaaagtcaaataaggcacctagggtgtatgtcaataaaaatgagatgggactagaaaggagagtcagacaggagagtatggaatagagtagaaaagaatataaaagtaattcacagggaatctgtgaaacatttgaagtgacaacaaagccaggagcttgcctataggataggacagtatcctggggatgccacatgccactattactgggtatatccgaatgcaattgtgtccgaggtcagaccctgttcctcactccctctctgactgtcctccatgtctctacagtttctccaatcatttcccctctactgagagagcatggtctgcataagagtgcagtgagaactcataaacacaggttgtagagaagatattttattttgtaagacaatgtctcgtttttcattccaggctggcctcaaatttggcacccatagtgctcagattacaaatgtacactctcatgcccaacatcattaaaaaaaatacttcaaacaaaaaacaaatgaaacaaagaatactctgtattgattttgatcaccactccctaaccagtttcttagatactccttttttttttttttttatgagtgccaggccttagcttggcttgtttcaagctagatttccttttttctttttcttttcttttccttttttatttgaattagaaacaagattgttttacatgtcaatcccagttccctctccctcccctcctcccctaccacccccagccccaagtaaagccctacctatcacatatcctttctgctccccagagagggtgagaccttccataggggatcatcagagtctatcatatcctttgggatagggcctaggcccatctcagtgtgtcttggctcacggagtatccctctatgtggaatgggctcccaaagtccacacctatgctagggataaatactgaactactacaggaggtcctgtagatttccgaggtctcctcactgaaaatcagtcccatgctgatttcccaggtatcagtctggggaccaagagctcccccttgttcaggtcagctttttctgtgggtttcaccagcctggtctgggcccctttgctcatcactcatcctctgcaactggattccagttcagttcagtggttcattgtgggtgtctgcttccacttccaccagctgctggatgaaaactataggatggcatgtaagtcagttatcaatctcattatcaggggagagcatttaaggtagcctctcctctgttgcttagattgttagctggtgtcatctttatagatctccagacatttccatagtgcctgatttctctgtaaacctaaaatgtctccctctattatggtatctcctatggccataccaccctgaatacaaccaatctcatctattcttagatattcttaacagagtcatgaaaagatactagtaacaaatacacaccaatgccaattctcttaaatcacactgcaaaattaatgaacttcttaaactcaaatgctagtacatatccctaatatctaagcaagcaatctgagctatttgattggagaaaagagccatgcaactttgatgaagctagcctgaaaatgccatattgttttgagagctttcgtggaagacagtgaatgctcagacttctgtaattataaaagatgtcttgagaaggtaaagcatagattttcatagccaccaattccagacaaagagtgagaccaatagttatttttggacaacctaatttaatatcacagtggtaggcctgaatttatttatttatttactcactaatttaaagaggctgctgctaggcagaaagaggttgggtgcttagaaatggataatgttagcaaagcctgggaaagatttttttctttttttcttttttttcccactcctgaaaacaataacctacatttaatggtaagaaatcaccagcaaattccattatgtttgtgggcttgacatgtggtgcttattaaatgtacgaacaaagccactttatacatcatagtgttcacattgcaaatgcgctgctcataatggtgctgcacgtgtctgtgcaatttttctgaacttatgaaatatatttctgacacctcaggtattgatgtatgcacgcgtgatattgtcccagtgcagtagggagacttaactgatgtctgcaagatttgatttattacaagtaaatatgattgccttcataatctgattttattatgttcggggctctcgcaggtaaacttttagtagaaggaagaagggcaattttattaaaccagtgtgttcctgcaaactgcggactttcttgtctagagggggagggggctgctgatttacaaagtatattgaaaatgttccaaaaagaatttgctcccaacattcccagcatcttatcatgtcaactcctgcaactatttcaaatcagttttcgctatttggtgctttatattcttgtctgaaaatccatattaaagtaaaaattcacatatctgaggccagcgctaaatatgcctaggagaaaaggcacttgaaaaacccagaagccacctacaaaataatggtaacaatttttttcctcttttgtaagagaggcaaagaagctcgatgaatttgaaagcattgatctttgatattgatgggcccaggcttttgattgctaagactctcaatatgagggccatagcttcactacatcaacaacaactcaataaattagaaactacatcccacgatcagcgttaagtctgggctttggactcaaaatggcagacataggtagaggaagaggccgaaggaggggcagagaggggttgggctggggctgaagttggggtctggcctagttacctttttacacaaccctttgatcctactactcagaaggcagaggtgggcagttctctgtgagttcaaggccagcctagtctacagaatgagttccaggccaaaccatcccgaaagaaagaaagaaagaaagaaagaaagaaagaaagaaagaaagaaagaaagaaagaaagaagagaaaggaagagaaagagagaaaagaaaaaaagaccagtcatactgatcaagatgacaatggcagcaactttattgtagtaaagttagggtagcccctcaggcctttgcaatgcagtaaaacagaagagaaaggggcaaaaagaaaaatagtacagaaagaaggtctctgttggagctgagagagtcagaagggccaagactaattttattcttcatttctttctcttttttcttcatttctttcttaattcaatcaatcagtggtaacctactgttccaaatttaagagaaaacaaaaagataatttttatactctgagttatgaatcacctatataaagatagaaccttggttttaatctcctttcacttatacccttaatttcttgggaaaatatgattggtttaagtagataaaaatccaataagatcacaggtgcatgctgtcagaacctgtcacatatttcccaggaggtaaacattatggaaaccaagtttccagtttgacaaccaacattagcaatgaaattgccttggctggagtttgaagatgtccaaagtgggcattcgacactgaagcaggtcttctgggatccatcagaataagggctagtagtccaagagtgggttccaataatggtacttgaaaattcacaaactcagtggaagctagcaatcagaatgttgaggccaaagatactacagctattcctgctatgtgaaggtcatgctatattaattttaacatcaaaaagaaaaagggtcttgtactttacattgttccaatttcctatttttaaaacatttttcattgtgccactctgcttgcttttcttggacaaaaatgtggtctctccatacattcttctttccttgaaaatgtcacatgttttgagagaaatgagacagaatagtgtagattctagctctggtagaatgctgacagaggaccacagaccctagcagccggattgagcagccagacagcaggaatagagcagaaactcagagaggcacaaagaccaggatctaatcaagtttctattcctcacaggaagagtctaactgagtgctgagttggaagctttgtctctggtgagccaccacacactcagaaggtccagtctattgtaataaccaccactccacctgggtaaaagtggtgtgtttttccctccccccccagcctgtattttccctccataggactaattcttcttttgtcctgaccaaccagtcaattattttaacccgttttcacctagatttgaaggtaggaaagcagcacgatcacctgttctagtacatagctagacagctactgtctaatatatgtttgccttcaaaattttatattctcaacacatcttgtagcttctcgctgtactctgtgaggtagctagcagctcccttccgttttaattgaaatgtatcgtgtgctggatcttatctagtatttcttccagcaggagttcccacatggggatctctctgaacacactgagtattgatagtccatacatcaaggtttccctgtgagcagctgtgtgctgggagagccgggatatgagtttaagatgggggggggaggggtgcttctaagtacagatgtactgtttctccacactgtgctactgtgcagccgggtgttgctttctgttacccttgcctggatgaagtgtgaggcttcctagatggcttcctatacaggtaaaattattgtagatccgtgtcattgacaggaaataaatcacttcccagtgtgttttatagggaagttcctttctggtggacacagcagtatttctatgatcaagctaagctagtgagagagatggtgaatgtgtaatgtgtgtgatatacaacacaccagaatgaatgtgcttattcctagatgcaggcagaagtgggaataaacaacttagagttagctgtagcatattatactttcaacattccctctatgcaagaaaagaagcttgtaactaggtctttagcacctggaatagagatggcaagcttgacccttacaaaggtagggtatcttttctcccacaggatatagtcattgtttaaaggcattaaaattgtagagtagaacattgcttaccagcagctgaagaagagtaagtattaggaagttgttggtaaaagcacatacgatttcagatgaatagaaaaaaagaaactctgaaaatctattggtcagaagagctagggatataattcagtgacataatgttccctccagcatacaagaggccctggatccaatcccaagcactacaaaactattgcaatgtgataattatggttaaccaacaatgtatgcaattctttaaaattactaagagaaaaaactataagtattcttacttaccaaacatgatacacctgtgaggtactgttaattaaattcattcagaaattaaaaaatatgtacacacctcagaggaacatgttgtatgtctcataagtatatttacttcatactttagacataaaggggtcttaaagaaaactctccttcagtcataaagcaaaatgaactaaaggaaaatgaacttttatgtgcacagtcgtactaggtgcctactgtttacaagctccttgacaattctcttctggaaagtacagtatctttttgtcatttcctaggaagatatatcattgtcacattaccttcttatgaaaaggtgagacgtcaaaaaatctgattacaggaaaggacagttgatactcagaaccattgagtagatatcttcacatcttctgagttttccacatatctgaaacaataagctgacagattatagtgcacagagagctaaaagctaagcatctaccattctagatgaatccttcctaagcatattaactgcaatttactgggggtgtcttttaatcagtcaccaaaacactaagagaacactatttttaccggtggctaaaatgggtatttatttctgacaggtggtaattctggagcctcctggcagcttggttagacctgacataacatgattttgccttattgcccacagaatgctagtacagttcacacccctgttttaaaggtgagaagagaaatggtggcctccactggtcttccaatttcactgggaagaaatggacgcagctcttccagctgacttctgagcttggacccttttatcaagaggatgtcatatatcccaatatgcttccaagaagtgacttggccagctgagtttctctcttaaatgctgtgcatcactgctcctctccaaaaccagcttcattgatgttgttttttagagaaaaaggagaggcacgtgggcataacagcatcatagatgagaatactccaaaccttcacatagagtctcacaacactgttcacataagagtgtcattcaaggattcaaaatgtggcaaggggtttgaaagaaatctaatccatttttattttgtagtcaagaaagcagagggcgtgggacacggactcccaaagccaggttacacccatgcctacgattccacttttcccactgacgtgctcagttgctcctctcctacctcgccactttcttcagatgcacattgctgttttcaacaaatctatagaataccactatgcccctgctcaaatccttttttagaacccaataattggaagtgctagccttgctgtggaaatgtcaacaagtatttggtatgcaggattcattcacccatgagaagacgatagtgtaagcatcctgggtgagacaagaggcagacagcagccttcgctgtgccttcttctcccccaggtgcatcaggaggggtggatgagggaagggcaggcactgtaactgaacacacttggccatccctttgttctctctgatctcttaggtagaagccctttcatgtttcaaatatgctcagaaggtaataaatactaacataatattagttttgcatctctttgtctccacaaatttcctgtaaccagagttcttattagatctgcataatacttgcagaaaagccgggttgaaaagccacccacgttccccaacagaaaatctcctcagcaaaactaatcacagactcgagcacatttggaatggttaacagatcaaaagggaaattaagctcaacagtgtcaccaatctaagacaatcagcattgattgtcacaacacagaagtggaaagactctgcccttgaagaaggttaagtgcatggagtaggtgtggttgaatggcaggtccctgccttgtctttagctaattacatggcctggggacattggcaggtcatgcctgactctgttaccacacatgatgctgggatttgcctatgggcggtttatgctcctatttgcttattgctataatgtttgctacattcctcacatctatgccttagcctaaatgttgcttcctacagaaagcagcccagacctttccctaaagagacatttttgtctctaacttccattaacactgatcattctttatgatggtatcatcttatgttaggttagtctgtttggcttattaaactgtgagagggggtattataaccccatgatgacttctgtgaatgggatgagactgaaatcaaactgtgactttcacagttgcctatgtcatttaaatgatggccaattctgcttatccaaatctctttacttctaatagtgcccaaactctttgttcttattgttgtatgctgtgtattatatatacatgtgtaattgggtgtcatgtggaggtcagagaagcaatttggaatatctttatctctctccccaccttagtttttgagacaaggtctcatcgctgacactagcactcaggattttggctagagtggctgccctggaagcccacaagctctgcctttctgccccacttcccctgctcttggattacaaacacatgctgctatactgaacattttatgtgggtgttgggaataaaaacccaggtcttcatgtttgaacagccagcatgctccccaatgagctatctacttagcacccctaaactcttctaaagattagcaagctttgggtattcaagatttgatgttctttacccgtttcttcctttttttagtctcaaaatacttgcattaaaattcaggtctcactgggacatggaaatacaggccaaaatctttatccctttattcctctatccagtgggcatgaattttagatatcttgttgatggaccccaaaatttcttcaacttttaacaagaaacacactgggaaaatgtgagtatctccttaagaaaatagtctgaatcccaaagaagacagtaagtagagctctcaactactgagcaagactttgttctgagggattaggaagaaccacatggtaggcttggttctgtacagttctaatcccagccctggggagcctgagacaggagggttgcaaattcaaggcaagtctaggctatacagtaagaaactttctttaaaaaacaagtaaacaaccataaaacaaaagaccctcttcccaccaaaaataaaaactaacaatgtttcttttgcaggtaaacatccttgtcccttgtctccaactaatcacctaagatttccaatcttgaaacaaaaattccccaattctgtcaacttatatttgacaggttattcaaaatactcaagtagggaaagacaagtctttttaataaatgttaaaaaaaataagttggatacttaacttggtccacatggaaaagtcaatggaaaataggttatagacttaatgttcaaacctgaagttgcatgattctgaggagtaaacgtaaggaaatattatgatagtggtgttagcaatttttcatggatgtgatccctaagtaccaaaggcaaaaatatatagataaaaaaatggacaaagaaaaacctaaaactcttgcacaggaaagaaaatattcaacaaaataacaaggcaacctgaagtcagtcacgaaaaaaaaaaccacacagctggaagagccaaaagcctaaggtaggtaaggaactcaactactcaaaatcaagcaaacaaataactttctttaaaagatggacacaggtcataaacagacatcacagtccaaacaggcatctgaatggtagacctgcatacaaaagagacagagcaatggccaacatgtatttttatcatgcaggacagtgaccatcataaaaccagaagatagaaatgttggtgatgttatacactaaagatattctgcaatatgtatcaaatcacagtgttgtatacttaagtatgcagtgttctatatgccaactcttttccataaagctaggaaaaacaaaaacaaaataaagtcaatgaacagtataataaaaatagaagaattcttcctttctctactttaaaactagaaagaggctcttcccttgggttatgctggaaacacctcaaaaattaactattaattttaaaaaaggaggaggaggaggactggagaagaagaaacatatacatactcttaaatggaagacaaaggcattgaacttacaatatttcaattctaacaaatgaaaaggagagattcacaggggagggagaaactcttgatataaaatgtacacagaaaactatcacagtataaataaatgtgtgtaatctcacaaaattaatatagttttgagtagaatagtgaggagtaaaaactagctggtaataattcttatttcttcagctgcattaatgactgagcagctagctaaaactcgacatatatttactctgcaaacaagctccttgaacaaggcataaatattacacttgacagtgcaatgtaacagtcttctgttttctcactagacaaagatacctatacatatttcagtagtacctagcttccttccttctgaaggtcatgctaagcatgttatttctaatttttcagaattaagtacttctcccattactatgttatactcgtataataaaactgatgctgcaaagtgtgaaaccctgcaccagaggatttagcatccattctttgcatgggccaactaaggactggaaaatatgaaaggatttgcttcctgtggtgtaatggaaggaattgcaggaagcctgctccctgtccctgggagtgagttattccaaggatcatggactcacataattgccacaaaggcactttccatagagaagacagatatatagcaaagggaactaaacacatgcaacttacagacaatggagtcagctctaacacgagtcatcagaacagtctgaattaagagaaatgagatattttttatactgcccataattggacaacctaaaaaaccaatgactacaaaaatctatgaaatggatcttgacattttctataaaaagctaaatggggagcgagtgaactattctctggggaacaatttggtaccatctaatcaaagtgtcaatgcacacccacatacacatttttctcccaagaatattttacaaattttgcaatttccaagcagagctatgaaaaaatacaaagatgatcatggcaactgatgcaaggtgacagatgcttgcagacattcaggtacaccactggaagcaagggtaccagtatctggagttaaaagggaatcatgtgaagactaccacaacacttacattggcacattgactatgcagataataacatgggtgaaccctaaaaacatatggtgaagagacaacagctgttagtaaacttatcaatccaggtgatagctccataaggatgcatggaagagtgtctatgagccagaagttggtgcccaaggcaacaagtgacttaagagaggtcagtagaaacaacagagaagtaatgctgcatgaatagtcaactgggccatcatggactggatcaataactggcagtgacaccacacagctgacgacactgatggtcagtacaaggtctggctgacgttagtaggacagtggcttacctatccctatatacaatggcaaccaggaacaaccagagggaagaactgcagaagagcctgaagagtcttggcagagagcaactaggaagctaaagcagaactctgtgccagtgtggcaggctctttcagaaggtaattgctgactgaacatccagaagacatcccagtttcctttccctcatgcataacaagtaaagagccatagcatagtctggatccagtagaaccaagagaccctatccacttctctgggcatgacaaaagggacagaagtgccgcactggaaggctgaggcaggtgttcccgaaggctgctgctgaggtcagtgggaaaatgcagcaaggttttgatttccttcctttctgcacagagcactgctggacccaagggagcatggaggaggcaactgagatctacagtgctcaactcagcacaattgcttgtcagggccctagacatggttccacttcatctggacttaagttcagagagttcaaaaccactattgctctctcaaggttaagcaacaggatatttggcctaagaagtaactaatgttgttactttaacaacagaatatttatcctaaggtgtggctgttgtgtattttgccttaacaacaggactcttggtttaaggtatggttacttgatgttttggatattgagaaggtaattaagtctacagccctaccaccctgaaagagccagagatctcatctgatcttgaaagctaagcaaggccgggcctgtttagtacttggatgggagaaggtaatgaagtttgctcattatatcttggtaaggaagtctctttgccttcccccactcttgattgggacatataaggactgtgtgcaataaatttggggatttttcccagtatccactggagtccccttctgactctatctctgtctcttgtatatttcttccctcaatccatactccccttctcaggtatgaactggacaaatctggtagaactgactgatgtcccccaaaatgtgggctacaaaagtgagagactaattcccaaaagggaattagtctaaatgctactgagtcaatacatacccaaatctggtttactagctttaaattagaattgcacataccgcctccctgatcagggcagtttgctacacgaaacatcttagaaaaagaagaacttggagaaatgtctgatggtggtattgcttcaaagtgaagatgactgttgtatgcttctccctcagtcgactacttaatattctctacttttctttctatccacatctgtagttgtcttcttaacctcctctgcttttgacttcttagatatgaatattgaaaaataaaaacaaaattaaaataaaacctacaagaaccactcagtgtttttttcttgatgggatgggttttgaattctttccttctaaaacttttcttttaaaacctcaataatctctaaagcctgtggatcttttttttttttttttttggtttttcgagacagggtttctctgtggctttggaggctgccctggaaccagctcttgtagaccaggctgctctcaaactcacagagatcctcctgcatctgcctaatgagtgctgggattaaaagagtgtgccaccaaagcccggctaagcctctgaatcttaataatttcctaactttttcttcttacctgaactttttctgcagttgacttaattcttttggcttcatttctgattttagtaattaatatcttaattagcacctgcagtggtttgaatgtgaatatccctataggctcatatgttttgaatccttcattcccagttggtggaactgtttaggaaggattagaaaatgtggccattttggatgaggtatgttgctggggccagctttgaggtttcaaaagctcacaccattcccactctgtctcctacttgctgataagaatgtaaacttgtagctacttctccagcaccatgcctgcctgcctgcctgctgccagattctaagtttccatggccaggatgttttatcatagcaatagaaaataaatatcaccatactatacttgcttgttgatcttcccacaatctctgaagttaaagagactactgttttaaactgtctagtatggcatttgcagagtggtctatccagcacttttggttgctcctgcagttaatattctactctgggagatatataggggtttttctaggtgccctgatcacaggagctaaggtttaaatactgaacttcacataattttaccacaagctagcccctcttgaaaatttgaaatactttaattgaaaggatacaggtgattttttaaattcagtctgtgaagatcactcagatggatgtcttgatgtagtaatgtaagcagcatgtaaacacctgacgatatgatatcccaccttgaaaattccagttctacaagaggacaaattagatgaacaccacatacaaggtatttaaaataattaattataagaatgctcaatgcaatcaaagaaaatacaagttaaactcttaaatgaattcagagtacaaatttgcatctaaataaaataagaagttagtataagatatgaattaagtttccaataagagaaatactgaaaaaagagaaatttagaaatgaaaattcagataataataataataataataataataataataataataaatgcccatggaaaggcctgagcaatagaataaatcaaggaagaaagaatgtaggtgatgaggcacagggacaggtgagttggaaaattcacatatctataaatataaaataataaaaatatgaacacaacatgcaaatcccatgtgagactactgaaaaatcaagtttagagtttaacaagaatagaatacagaaagcttcaggctaacagcataaacaaggcattcagtagaaccatagcagaaattcacaaaatctagagagataactacccagattttgggaggcatttagaaaccaaagagactagaacaaacctgcacaggtcatgtcatagttaaaatgttaaacacaagaaataaagaaaagataccaaaagctcaatagagaagagccaagacacttgtatagggacaatcatcagaattatagcacattctcaacagaaacttttaaagctagaggagaatggaacagtggataccaggcactgaaggacaactgccaacacagatcattatatccagaaaaaaacatgtattataactgaaggcgaaattcccaggatgaaaataaactgaagaaatccaagaccactaaactagagtgtgtgagatacttaaaggaatgctgtgaactaaggacaaatataaagacgtacagtatgttacagtagacaacaaaccatagaagagtagttaagacacagccttaaggtggaaggatagaaaaggtattccaagcaagtaggaactagaaagaaagcatgtgttactattctagagtctgaaaaacaaaatgttagaaaagaaagaagccctgagcaccttccagtccactttttccagcatcaactccaaggagaaacctactcagctgacacatccattcacccataagtaggcaagagcagttgatatgtcttgctgtaatgaattaagtcccaaatccttgaagggagaagttaaaagtaaaaacaaatgttagggtaataatgaatatttagggtaaaatgacaaggttggaaacaccaaggaagttaaataacagtgcatgcatctgtgcatggcatagtcaatcagaaggacagggttatgggggaaaaaaaaagccaatctcaacaggctctgaccagcccctatgaggttcccttactccacagaaacatccaccaagtgccattgtcctttttcccctagtaagttcaatttcataggtagttacaacttcagatatgtttctaagctggatgcatctaattgtaccagactgaattgtgggtaagaaaacttccacatactccaggaaggaaaccatcccagattgtaccataaatgggcaaggggaagagaatggttggctagaacttaaaagtcactgctttctcacttgcagaaataaagcttgatcacagagagagagagagagagagagagaaagagagagagagagagagagcatgctgaataaaggaacaaattactattactattctaaatatatatcctcagaatactggcacacctgatttttataaaacaaacacttgttcgaaagatacagattaattccaacatagtaatagtggatattttttaatgccctactctccactggtagataggccattgttctagtttgcttctctattgctatggtaaaacagtgactaaaagcaatttgagaatgaaagggtttatttcatcttatactttccagtccatcaatgagaaaaatcaaggcaggaacttaaatagtaaccaggagtttgttactgaaacagcaacacagagactttctccctatggtttgctcagatttctttcttatgcaaacaagtaccacctacgatggggggatggcatcacccacagtggacaggaccttctcatgtcaaacattaatcatggaaattcccccacaaacatgggttcagaccaatctgatggaggcaactcttcagttgaggttccttctttccaggtgactctactttgggtcaatttgataaaaattaatcttaacactcaccatgacagaaaataaacagagaaacatgagttaaatgagataataattcaattggtctaacaaacatctgtcacgtattccataaaatactacagaatacacattcttctcagcagcctatagaactttacctaaaattgatcatatattaggactaaaaaaaaaatacatagaaaattaaaataatcccttgtattctatgtgctcacaatagaaaaagactcaaaagaatcagtaaaacaacactctactgactggtgaataagtccttggagaaataaggaataaaaaaagtcctagaactaagtgaaaaggaaaacacaatataccaaaacctatgggttaccatggaaacagtagcaagagggcagttggtagttcaataggtgtctacatttaaattaaagcaatccaaataaataacttaatgatacatcttagggcttggggaataaaaggatgagccaaattcaaaatcggtaaaagcaaaagcatactcatgattagcacacaagtctggtgagatgactcagtaagtaaagatacttgctgccaagtcttcttaaatgcatttgatccctgggacccacacaggagaagaagagaacgaagtcccacaaaaatgtcttctgatttcttcatgtgcacaatgaagtaataaataaacatcttttgtgtcaaagcagaaagtaataaaatggaaatgaaaaaatacaaagaatcaatgaagcagttggttcttggaaaagataaacaatattggcaaacccttagccaaactaaccaaaagagagagaatactcaaactaacaaaattatctatgaaaagtgatgcaacagataccaagaaattcagaaaatcattcagatatatcttaaaaacttataccaaattaggaaattctaaaagaaatggatgaatttttagactcatgtgacctacaaaaattaactctagatgagataacaacttatacaaatctcacaacaaaatttcccaactaaaacaagtcaaggcccagatggattaattgttgaattctacacaatctttgaagaaactacatcaatgtttaacaaactgttccctgaagtagaaagtgaaggaatactgccagagccattctagaaagctaccattaccctgatatcaaagcaaaatacagatacaaaaaatgaaaattataatcaatctctctgatgaatatagatgcaaagattctcaacaaatacaaacagaattcaagaatatatcaaaaagatcagttgccatgattgagtaactttatgccagagattcatggatggtttaacatatgcaaattaataaatgaatggactccaggacataagtcacatgatcatctcaatagatgcaaattattttttgtaaagcgcaaaaaggatattttattgaatggtgtgatggcaaagggataacaactaatgtttcactagctgacacaatgtagattgtttataatgataagtcttaaatatgatgccaagaatatttccaaaaaattaataattttaacaatttttaaataatgtttgtcttgctatacaaattcacttagacacaaaatgtttgggacatactataagggtgaattaaacaacatatataagaaaaatgtgctacacatatttccaaattcacattgtaatggtatagaaaaattagtatttttattttaaccacattatatcaaagtatgaaacttttactagatctagagtttatacagaatcaaataatataccaattagcttaaatttagctttttctatgggaataatttatacagctactgatgatttaaattctattttctttttttttcttccaacttttttatttgaattagaaacaggattgttttacatgacaatcccatttcccttctcccacctgtcctcccctacccacccacccccaactaaaaccttatctgtcacatatattttcagctccccctggatggtgaggccttccatagggtgtcatcagagtctttcatttcctttggggtagggcctaggcccaccctggtgtgtcttggctcagggagtattcctctatatggactgggctcccaaagtccacacctttgctagggataaatactgggcttctacaggaggtcccatagatttctgaggtttcctcacagaaacccatgttccttgggtctggatcagtcccatgctggtattccagctatcagactggggagcaagagttcccagatgttcaggtcagctgtccaataatcctttcatgataaaatccctgaagaaactagtagaagacacactataatataaagactctatacatgttatacctatagttaatgtcaaatttttaataaacagagaaaatttcaaagcattttcactaagatcagggacaaggcaaggatgtctacttctagccaatgtagtccttaaagtcttagttggagaaataggatgagagaaggagataaagaagatacaaataaataaagaagtcaatgtattcttaccaacagatgttatgattccatttataggagatcctagagactccagtagaaaactttagatcttataagcactttcagcatggctaattgccttcttacatatcaatagcaaacatactgagaaagatacaatggaaacaatctcattcataggtacttcaataaaataaagtaaattgactaggaataatcttagccaaggaaccaaaatacagtgaaaagtttaacaaaataaagaaagaaattaaataacatacaacaaaatagaaaaacctctcatgttcatgaattggaggatcaatgagaaaatggctagagtgccaaaagcaatccacatgcttcaaagaaatctccatcaaaattccaatggtcattcttcatactaataaaaaatttcttaaaaattcatacagaagcacaaaaggtcctcaatatcccaagcaaccctgagtaaaaagaacaatgctggggtattactatgtgaggctttaagttttaccagatagccacaataataaaaactgcatgtagcaacacaaaaacaaacacacagatcaatgaaacaaatgagaaggcaaacatataaaaccatacagctaaaaccacctgttttttttttcagaattctcaaaagtataagttgaatcaaagatagccttttcaacaaatgatgctttgtacactggatattaatccatagagaaataaatctcaatctccatctcttaccctcttcaaaaatgaatttcaaatgggtgaaagaccttaacataagaccagaaactctaaaactggtaatggcaaaactagggaaacgcttcaatacattgacataggcaaggactttctgaagaggactctagccactcactattagtaccaaaattgacaatgggatttcatgaaattaataaaataaccctacagcaaagggcataattaattgagttaagagttaatctatagactgcagaaaatctttgctagatgagtatctgacagaggagtcttactcaaaatatacaacaaactcaaaaaagtaaaaacacaaagaaacaacacaaatcattaataggccaatgaaataagtacagagttctcaaaaaattaagtcaaaatagtttaaaaacatatgagaagttcagcatcattagttgtcttagttgggattactattgctgtgatgaaataccatgaccaaagaaacatggggaagaaaggttttatttggcttacacttccacatcatagatcatcattgaaggatgtcctgacaggaactcaaacagggcaggtctcggagagcggagctgatgcagaggccatagaggggttctgcttactggcttgcttaacctgagttcattctctctctctctctctctctctctctctctctctctctctctctctctcttccctctcccttccctcccaaggaggttaaccataccagtcaaaatacaggaaataatctcacactagcaaaaacaaaaggaggaaagcacacacacacacacacacacacacacacacacacacacacaccaataacaataacaacataataaaaacaggaattaatacaatcattggtcattaatctctctcaatatcaatgaatctattctccagtaaaaagacgcagactaacagaatgaaagtgaaaacaggatccctccttctgctgcatacaagaaacacacatcaatataaaaaacagactatctcagactaaaaggttgaaaaatgattttcccagaaaatggccctatgaggtaaggtggtataaccatcctaatatctaacaaaatagacttcaaaccaaaatcaatcaaaagacacagggaaagatacttatttattaaaggaaaatatccaccaagatgacattccatttcttaacatctatgccccaaacagaagaacaccatgtttgtaaaagaaacattactaaaggttaaatcacacatcaaccccaacacataaatagtagaaacttcattttcctgttttcttataagactcaggaccaccatctcagggatagcatgactcacaatggattggccctcccccatcaatcactaattaagaaaatgccctacagttggatcttatagagtaatttttctcactagtgtccccctcctttcagataacttttgtcaagttgacagaacactagccagaatacactagttaaaagagaaactcaaatgagaagcatatggtggtagtatcttaccccagtcagcatgtcagtccttaagaaaacacactacagcaaattctagtgagaatatggacaaataggaggcttattccactggtgggatgtgaacgagtctaaccactagggaaatcaacatggaggctcctcacaaacctaaaagacagaactatcacatgacccagctatgcaaccaaaagactctaaatgcacatttcatagagagaatgattatgaatgctaattggaaaactgctcacaattgagaagttatagaaatgatttctctatcatcacatggctaatgaaaatccagtttatatacagtggaattttcttaacccatgaagaaaaacaaggttgtgttgttttagaaaatagatacaaccagagataatcatattgaatgacttcagtcatagacacagtgattgtgttatgataaatctttctgccaaaagccgccgagccccaatgccacatgtgcgctttaggccagccgcccgcccgagttaagcccaaatgaatacacagaaacttgtattaggttcaatgctgcttggccaatgactaggattcctcatctgctagctcagtcttaattatcataaacctatatattttataagacttatcttatcggacaccttattggcgtccctccttgccggtggatcacattgtgtccctggagcaggagcagagaggaaaagagggatgcttcctgtttctccttctttaaatatgagtctccttgctatgtcacttcctgcctggatcaccacttctctactacatttcccagaatcctctctgactcctagtcctgtctaatctgctgtctcattggccaaacagtatttattttaacaatcaataagataaacatacacagaagtacattccccatcagtgattgctttcatttgtggatcctagactttaaagtctataaaaccatgcattacaaaaaacatgaaagtatacatgagactaccaagaagaacaaccaactgagagggaggatgggtaaaaatgggtggatgatgggaggagaatgttcaaagcacatcatacactttcatgaaaatgactttatgcagccttgtataatgaagtaaacatttatgattcacaaaactgcaaagaaaaggtgaaagcagtcaatgtatttcaatatgtgaatgggtgaacaagtcctggtacttacattcaatggaatactgtcaagggctaaaaagaaatggcctgtcaagccactgaaggcccagtagaacttaatacctactgctaaacaaacaacagataaatgaaacagactatgtactatgtggttccaaatatgtaatgttctggaaaaggcaaagttatgaggagcataaaagccaagtgattaccaaggacctggcaggtgggaggatgactagatggaacacaggttattccagagcagtaaaactatgcaagtgtcactgtagactcacactattataaatctcagcgtctaatccaaaggttaaaccaaccctagtacaaactatgagctttaataacagtttatcaatatttgcccattgattataaacattgtaacacattaatgcaggttgttactagaagggaatatttacgcaaatgagaccatagggccccaggcagcagtaagtttacttttactccaaagcctttagtgagtttctcttttcctactacaccaaaaaggaagagaaggttggggggcttactctaatcccaaccaaccaatgcctacgcccccattatagctattttcatgcatgtggatagaagcagggttcctaatccctatacttagaaaggatgtatcaactccttaggtctgataagagaatagtgagagtcaccaagagggagggactcaaactcaaatgaaaacccagatctctttagggtcagaggtcacccaactcgggggcccattctctacccatgaactctatacttgccaataaacgcttcactttcacatttctctgagctgtttcctatctttaaattctttaactgacagagaaaatcaacccacctacttggctggtatcataagatggaaggactggaaagggatatgtaaaaatttttggaacagcccactcaattcctctgagtgatggttagtgttgagtgtccacttgacaggacctggaactatcaagaagacagaagacaagcctgaaggcacagcagtgagggaggatttagattaagtaagcctctgaacatgcttgtgaacgatcatctcaaataggctaattgaggtgagagcatccatccgaccagtgagtggcaccattcccctggcttaggtcctgcactgcataagaaatagacccctagtacttactgctccctgcttcctttcagctgatacaatgtgcacagctcaggcccctgccacctatgggctgtgagagaaaataaacttttatttctttaaattgccttcaaaggttatttttatcacagcagcaagcacataactaacacattgtgtaaacctgaaagcactctaaagacttcgttgctttaaaaaaaaaaaaatgactccatggcactgatttaaaggaaatgggtagagatgggttttttttgtaaatttaaaatgttcataaaaagcaattccatcttatataaggatataaaaattatttgttaggctagtgagaaggccgcctaattaggagggagatcagccaagtatggcctatggataagaggaaaggaagagaaactcaggagaatccctgtgctgtcggtatgagagtgcatcagaaccaggaggtaaggtacaactagccccataagtgaagcaggaaacaaaaccaggtgtgggggatggagagaggaaggccagccagttgcttaagaaatcttagtgacctaagtggataaagtcttggatctaagaacaggctctggcagaggcttgctaatcgatactttctctctcctggtcaatttctctatcaggaaggctgtgatacagaacggaagcttcaaaacaaagcctgcaaagggagttgcagttcatgtttttaaggtggtttgtttaacaaatgagctctgaagaactggatactgtgtaaccagtacctttgcaagcttgagccagccaaaaaaaaaaaagagagtgactgagaagccaagatattggtcataaacttacagtagaaattatcattcaatctttaaagcaattatacaatgtgggactatgcagatgacactagaagacatgacactaagtgtaagcagtcacagaaggaaaaagtactgcacagttccatttataagtctgtgttgtcatgtcagaataccataatctagatagcttattttaaaaaaaaatcaagatttatttttcacaattctaggggcaaagtattccaatatccacacatcatttgccaagggatgcaccctgttttcaggacataatcttgcttactgcttcctccagagggaggtaccttcacctggcagagcagagaaggaggtaaggcaacaccctccaccaagccttttgtccaactgtattaatccattatgagaggttggtccttgtagcctaaatggctccagaaataccccaccacccaacactgtggcactggagactagatctggaacacagtcatataagagcatcaagagagtgtagaaagagtggagccatggagtgggtacagcacatcagaatgaggagggctccttgtaagtgctacagctctgaatggaaagcattgcagctctgaggggaacacccaatagggagggggaaggtatcctggcagtggggagtcaagggataccacaaagtcataccatacaacaaaccacacacaagagatttattgagaaaggcacaagatgatggctgctcgtggaaagcagactttatatagggtttctcaggagatggagctgcctagggtgggggtcagtgggatttcaagtcctgaacttggcggaagccgagggacttggtgggattttgagctcagggattggtgaattttcaagctcagaagttgttaggctttcaaaccaggaagtgagttttgacctttgaccctacattcatcaacatgtaaaatctcagttattcaagggagataacctctagaggattggcagacagtattgtgcccactgatattaataacatactgtactcttaaaaatttgttcggaactgggcatggcaacacaacacttcagtcttagaactccagaggcagtaggaccaggagctctggcctacctgagctaatgagaatttgcctcaaaaagtcaagggggccagttgtattgatggggaatgttcttctgtgtatatgtttgtctcattggttgatgaataaaacactgattggcggccaggcaggatgataggtaggagtaggagacaaggaggattctgggaaatataggcagagaggagtcatcatgggttcccaagaaatgactatagctggacagaaaatgccactagctagccatagagttatggaagtctgtacagacaggaaggaagtgatgtagctgggcagaatcagaatataagcagggacaaacaggaagtggtgctcttctctgcagagacgtagcagacaaaggagttgcaggtctggcatcccccagtaagccaagaccacatggaaatacatagattaatagttacgggttaataattaagtcagaactatcctataagaaaccacagccaatggccaacagctttataattaatataagtctcatgtgcttctttggggctccaggaggctggcaccaggctggcgggaaacatttgcataacaaaatggtgcccccagaaaatccacattacagtgtattgcacacatatttaatcccagcactcaggagatcagaggcagaggcagagggaaatcctctgtgaatttcaaagtagcctggtaagcaggcaaacttacccagtgagaccctacttcttaaaacaaatgagtaaataaagaaggggaaaacacactgtaaaaacaaaataactgagtaaataaatatcccatctcaggtgggagggttcacagtaagtactctcaatacttacaataaaaggtaacaataaaagactctttctgcttagtaggtagtccatgtcttaagcaatcatttgttgacaggcatagttgttgataggcaaatatttacattatcaactatagcattggtttttgagatttaaagcaaagcatagcaaatgcttaaagaatatcttgctagtgggcacaaagataatgtctctacttctgttcatttgaaaaagaaagccaatccaagacccaattgtacctgctatttcagccatcctatatgctttgttttcacagctttcgggggaagtagtatttgagagttggtatgtgaaaaatagagcaggattcctgaagccagtggctccttgcacagaggtagtttgtagactgtgggaacgggctcagactcttgtgaaatagtctagatgctcacatctctttgcaggacatttctctgacacattggtggcatggtgcaaatcttggcagtggccaaggcctgactgtgaagtaaggctcaatgtggctttgaacccaaagaccatctccttccttagtgaactcctgagaaaagcttatggaaggaagtcatatctttcctcctgagctggcttcagagaagaagggaaggagggaacaaagggctttctttccctactgagatcccatcactccctggacatgtgagttcattcgtttccgccagtatttccccttcctgggagataccagtgggtagggagagaatattctttacctggcatctccctgggatctacagatctacctgggatcttgtacaaggtcccagaggttattcactaccttctggacactgtgaattaccgagagaatgcaggagttacattaatgaactcaaacagatgaacaccacatgcttgagatgaaggtaggtgttcacttgtccatctttttaaaatactatttctcaacttcattcacatctatttagataccatctcatctgaaagagcatcctggtcagtgtgcatgagcagtttggcatgcttcagatataacttcatagcattatctattgcccacatgttacatgtgtgtgttactactgccttatcctctggttttctccagcaataatagcaaataaagatgtgattgccaaaagagcctaatggtacccagtgctgtgaacaatccctgggacacagcagttactaaataaatatttgtttaatgatgaatgtgtccaacctataaagtaggtatcttagctctgcaactgtgagcatatcgtccctcctattttattgccagtaggatatagattaaaaacacttattttgcctacctcctagactcacctgagatgtcaatgatctagatttatggtattctttaggctatctcagagcagatcaatcctgtcaaaataacattgtgagatacagaattctaaacagctaagatgagatctgtgttgctcaatttccagagttgatctaaagtggatagcttggtagtacattcatggcacatcaactgtaagggccactgagtggtagaatcagggaggagcagaggcagaggcatggtctaagagttatgaagcctttatctctgccccatcccaggattccaacattctcatttgttaccctgccagccaatgttttttgagtgtgtgaaatcaatgacttgggttcaattccttcctcaagtgtctaagactccataacttactagaagaagtagcacattggagccccaggctgtacaactagaaacagagttcaccaagtaaaaattgagtctattttgttggagtttgtctttttgctgtgttgttgctgttcactctccttttgttagtatgccttgaccctgtgcagttcattgaggactgtagttagagttttagaaattgcattctcctcttagctctcaacagtgctggaaataccagttcaccgatgcggaagttcagaggaaatgacatcttcacagtgtcccttaagcagttccttccttctggctctcatgcattgtaaaggatggacagcactatcagatagggaaaattacactggcaaagctctgtctcaggacaataaagggataggtgacactggctataaatggaattggtcctctattcagtaaatatctcctataagccatacttcttttgcaaatgtaaaattacttcttatatttcaaatttggtaatgaactcaagaaaattttaaatattgaagaatcttttagggtcaaatccattgctttgtttctgctacatttgtgctagctttgtttcatatgtcatatatctgttataataggattcacctctatttaatgtgtttgattacctgtggatatgggtcactaacatgtgggacccaaaaggatcctcacctcaaaagagactgaaataattctggttggattcttgagctctaacagtgattgattatagaagcacgctcaatttctgaatcaatccccagctccttgtttcctgatgtcatccactatgaggcccatgtttgagccagactgatcggaataccatgccttcggatctttagaaagccaactaaacttcttttctttataaagtagcctaaccaaggtatttcttataaaaatgaaaagtgaactaatgcaatgtattttcagcatttagatctcctagtctaaattgagttcagatgggtaaaaaaatcccaagggagtttgtgggaaagagggatcatcacatatcttcaaagaacattacaacttatggagaggaaaacttaaatttcttcccttataatactgagaatgagaagattgcatgaggaataaattaaatagcatgtgtaaaagaccttatcataaagacccaactctggaaaatatctactaacctatgccaccttctattgtactagcacaaagtgtcttctgtagccaccattgaacatccctggaattttttcaccgacatccttgtaatattcacgaatggtgaaatctccactatgccacagctccccagttcaggctctcagtggtctgtttaagaagcactcttccttttgaacagatggcaggcaatttgctctagtttaaacactaactcagactctgagatgagaacagaggctgcattcctgactctcaaatcaaccccctctggtgtgcacaccttaatatcaacctgcaaagaacacacttctgaaccaagggtgagtgtgttcttagcacagacattattgcgacatccagtgatgaaattcacacccatgcagaccctcagcgacaaaggccgatgttccacattgaaaaataaattgctttgtgtatgtgcatgtgtgtgtgatctctgatgcttgataagaacaattgaaaagaaacaatatctccttttcgagatggagtgaggagaggatgctgcagactttccccacaggaatcccacttgctgctattaatacaattaacctttcattgttaatggccaaggtcatttcccttgaaatcatcaggccggtttctcagttgaatttgtgtgctcttactgtcctccacccccaccccacacacaccaggctcttgcctgtaatctgtaattcctgtttgctggactgtgggcgttccaggacatcccctcatagttatgaaactactgaccggtggagccttccctgcagatggatttcattcgggacttgagctattatattaatgggtttaatttaaacaggactagcctcgctggccaaattactgccatttaaatcaattggtttaggggaaagacagcctgaccagagctattagacttcaatttattactgtatcggcttttaaaccgggcaaagtaagtttgctaatgtctgtcctctgtcctctgagctcaagtgcaaaacaaaataatgagattctctggactttgagaagaaaaaaagaaaggagaacgtgaaaaaatatatattaattttgagtcaccaactcatgaggccagacaaggtgccccccccaaaggaattcccaccatgagatcctatagatgtctttgattcccttcattaactgagaatcagatgacctcacagacgtgtgactttaaaaagcctttttacttggatctttcctcttcatgaaaaaaaaaaaaaaaaataagcactgctttttttccccctctcacacacatttcaacctgattcaaatagagaggcaaaaggggagaaaatgctttagatgtgctctttgattttttccaatctcgcctgaataaaatggaatgagaaatcaagaacactcaattaattgcaacactgggtgtcactaggagagggagggggagatgaaaggcgcattagagatgcgcagccttaacaaatgcatggattcaaagaaggaagaagaaggggaaataaaaaagcgtgtctgtattttattgcactccgtaagcttttcgcttgtatttatagctgcaattatatctcaatgaggtttgtctacagtgttggcttcacgctaattttccccctcactgcattcttggaataggctcggactgtttatgaaccagacatattgacctcatttacagctagcagtttaaatccataatttttccacccacaatccctctttgacattccggcggtgcggccggctcagcgagactgaactaaaagtctcacacttcattgaacaccattatgcggctttatgcttatgagcctgtttccctcggctgcctttcagctttgctggagatccgtttggccacaggccggcagtgattaagtggaagaatccaataaatcaccctgtcagccagcaggctctcctcactgtgtctacacatcgacatttggatttgcgcctctctcctctctccctctctctcttttgattttctatccctctttccctctcctcccctctttctacagtgccattaaaacacctctttcccttcacacaaggtgaacttgaactgctattgtgagcagggttccctctgagccctctggggagacaggctcctttgatttgcagttcccaggtcctgactttccctcccctttcttccaattaattcaccccttaactcctaggccttgaggagggggacagaccagcagagcaagtgggaaagagaagagagccaggtgccaaaaaggaagtgccccaccatcctgtctactcccaagccactggagaaaccatagtaccagaaagggaggggacaagagctgtgagtctcttagcctcacaggacagcccccactggtccatagaaagtcctttggagccaggtacttccttggggctacgcatgctgggttcactgttcattggccacgcccaggttcccaatactgtatcagactctctctggaagaagggttattatgggtccatctcagacctgactagccttgtctggcatcattagctgtgggtgcagtcagcaagctcccctctgttctcactggtgagctgagtttgtgaaacagcctctcctttgacttgcctggtaatttcctgaccctgtctctttggtattccctgcatagccacagttgtcttttgtctgggattatttctgcactgtgagcacaagcatttgtttgatgtcccagacatcaaatatactgtacactctctgagtggccaaaggaagtgggattcttgcttttgaatactcctctggcagaaacgacaaagggcggtatgaactccagacacaaaagatgggacagaggatgatgagaccagtctggggtgggtacatgcttccctcctccctaacatcatggaactgagagcgccttggctatgctgtgcatatgtgtgacagcagggatggccggtgagccagaaaagaaatcgatacagtcaccaaggggtggcctgcctttgttatgggcttcctgactgtgttggataggaggaagctcttgcagagagccagggatgcctttgtatccatgcctctgcctcctaactgatgctctgtatgtgttacttactggatgtttgcattttgtaagctgccttatgccttttgcaagttagctacatggataagcagatcatcagaatgttagataatagacctacagaaggaaactaaggacggaaaattatgggctggcgccttgtactcaattcctggtaaatattccaagtacctgccatgtcacaggaagttagcaagtgaaattctcctaaatgccttgttaggatttaatgctactaagccctcacacttgtattttgaaatcttaactccttgggtgattgtagtaggaactagggcttgtgaaaggcaattgggtcataggggtgggactctcatgaatgggattattgcccttacaaaagagccctaaagagctctctagatctcttttcactatgtgagtgcacaattagaagcttggcagtctgcaataccagaaaaaggtccctcactccaaccccagacttacaggctccagaatggtgagaaatttctactgcttacaagccacacagcctgtggtactttatcataacagcctgagctcgtcaagacctttttctacacagtgatgcatgtaaatgctactcaagagaaatggatgtggcccttcaggatcagcaactaccatagtccatttaccttcccaatttgatagccagcatctcctctactctccccaccccttgcttcctcagctctctcactctttgttcagcacacgtcagtacaccgtcatggatgagcgaacacataaccaaaatccaaatcactgtaggggagatgaacctcatcccattagtggctgctctgacaacattccagcgaattgcatggaagcatggggaagcagcgatgggaaggatgctgcattaccccctttgccattcctgaagatcacagaagggaaagaagccccctgataacacttagctcaagagcctttcttgcacaagcccttaggttctcagtatttaaaattcaacaaaaatataaagacagcccacgaattgtgaatatacagcagagaaaacaggttctctgagttactcggttattgctgtaattgcagagagctaaggcagggaggcttttatttcaaaaactatctgtcaagtatggaaatttacatgatgcccaggtaacctcattgtcaaaggcatgcaaactgcacctgctttcaaaacgaatcatagttattgcatgaatcaagttacctcagagtgactcagtttctctgtaatagcagaataataaaagtatttgttacctcgctgtagtgaacggctcttttgagaaagaatgatatatgtaaagtgctttgagtccctcagagagaaggtaatcttggaatttatgtcagcattatcattaaaccttttctccgggggactcgatatttttcaatattgtctcattgattccagcagtctcataaacaggaggaacaatagaaaagagacaggatcagtcaaacacaaggcaaggactgggatcttctttgtagttttagtcaaatccactctgtaaactgaaggaagcccacacagctctctgttccttcacctggaaaatgaaggttgcactgaatgatgtccaaggttttctccacaattccaattgcaggaacagaaaataagagaagcgtccatccttgatggtataactttcacaagagcctcctcctaagactctttacatctgggttttagccacatgctctccatggtcccatttggctttacatcaatggtaagttagtgttgttgctctactcttgcctggcagcacggacattgtccaaagtctcatgcttggccttctactctctcctgaattccatctctgcaactccatgggtttctagatggattatcacctttgtggggggaactagtttctctctcttgtcctgaccaccttttcataatccacgtacattattccaacagtctgtaacatacatttctaccaacatgtcaggttccacaatggaagagaatagtcctgtgttctaactatggaatcaaccaaagttcagaaaaataaacaccacagatgtgtgaagaataaaaaacatagcataaggatgtaattttacccagagtctgggactggtagagtcaataaactgattgctgcctgggcttggtgttgaatctaaagttgaaatcagccagattgacatttcaaaagggaagatggatatggccatgggacaggataactggggcagaactagatcccacatgggcctttcacagctgcagtggctgttccaagtcatctgcagtggaaactgatgcctttctctgtgggcctttgctcctggcccaggactaggaaaaggtaaaggcaagatagagcaggacatatgtattccaatagggccacacaagtgatagatcaccagcaatgctcataagcctcatgtttattatcacacagcacggaacttcagagcaccaagtacatagctgtggctcactcccactcacagagctcatgcagcaggtgtcaatctcacggccagctgtcatcagacagggagggagggggaattctgcccgagttaagaagacaaagctacattaccccccaagacttctccggctgcatatctgttcacggcattgtctttcccttacaaaccatgaactagcctcattccaacatctatccaatttctaaaaccaatgcaatctactctcaaaataagttcgccatttagtgcatcctcttgttaaatctctgtgtaccatgtttggcaagcaactgaggctttctttcattatctcttatctagaccattatgctagtccctaaaggcagcccaatccagactatctcttctcccttcagtccgtgtgtagttatgagcatctcactcccctgccaataagattccacagatgccatggttcagagacaaacttcaactctgatgtctgctttctataatagtttgcaatcatattctccccagtgatctttatgaattttgtgttctgtacactgtctcgccattcgcttttccagatcctatgcctacccttacccatatcattcctcctagctaattcagctgtcatgatctcaggctctgtcaaagtggatgtaatgcatttgtccaggttccaggtcctttctagaattctgttttcttgatatctataattgttttcagctctgaaaatcctaaatgaattatcttgactctttttagcaaagacgattatgaatggagtatatgtcacaagccacttatggaagtacagattaagatacacggtttttgggtgtagccagaaccacagatgcagctgggtggatctctctaaatgctaactgttgagttgtagaaacttaactgtatcctatctgtgcaattttcctgggttctgtacatagcggaagagcagcaaggacttgtttcatgaatggatagtacatgggctcaggatttcactgatgatgtgctatgggaaaatagctcaacagaaccaatatctcagccttagatactttcactttgaaagcatacttccaagtaaaaatgttgatgagaactatcctaagactcaagtgactttcattatctcttacctacgccattatactagttcccaaatgcagcccaaccccaatggtcccttccccctccagttaatcagttatagctgttataactgtctttttttccctgccagtaagattgcacacatgccactgttcagaggcaaactccaacttgccaacaatcaaagcctaaacttagcaccaccttgaatattgtgtgtccggtaggaaaatactggttgttagatttttgtttaaattagatatattagatataaagaaaaggcataggatgagacacaggatgagacatattagacatgttattcagtttattataggcccggcacagtagggagactaagagagaagagaaaaagggttaatggctgaccgccatggctggttgccatagagaggcagagagaagagacgcagaagcagacagagaagaggagaagagtagagagagagagtaaatgggcatgggtctgtcttttaaaggggtcctctgtacctatgtacagacttagttcccatggaaccctgggctgaccaggatactgcctgttcctccaggtaacaggggcaggccagcataatgcctgaacctttcactggtcatgttattagaaggctgggtctgacagaattcagggcttaaatgagttttcttcagattctgtgctttgttatgtacatcattatgggttaccctcaaacccatgcaatgttcccccagatgacacaagcttgacctgcaccttgaaccttactgttaacagcttcaaagttcatgctggagttttgctgaatagctacttgttctgtagtcatgcctgcacaagctagttttggccaagaaagcagaactcattacctcagttagatgagggtcaaagactacctcttcccaaactaaactgagggtaggagaggtggtccttccaaaaaataattgccaaagagaaggatgttggacagaattatttcaggtgttcactctatgatcttagaaaaacagtgacttgaagacctttgttccctctcacatggatacctgcccattagctctctcacccatgctgaaattctttcactgtttacacacatttcctggggtagacaacagaatgctattctgtgttatttgggctaatgtaaagagaatctgtgcagcacacctgtaaaatctaagctcctagcccaatgatctaggataggcatgtaacataagccagatctgacctgacctgatatagattgtttattccaattctcaatcaaggggatatatacgtgtgtgtgtgtgtgtgtgtgtgtgtgtgtgtgtgtgtgtgtgtgtgtgtgtaatgtactttgcaataattatatattcttcctactttaaaggtgaattttcaggtattggaatccagggatcatttgcgtgagactacagtattaattcttaccacttgcattgcaccttaaatcttcaagacacttcacaaccattaactaattacttttcaagatgctctctggaggtggataagtattacccagagttgcagattaggaagcagtatgcctgagagagtgtacagcctctgtgaagcccatcaacacacctcaatacattcctcagaacaagtttttttcttggtctgaaaggactgtgcaaagaaattccaggttcttccacaccaaggaaagcaacaatggtctatgtaggaattgcacagtggctggctgctgcagagagggctacttcctttttctaaagatggccataagcattgtctgattagaagtccacagcacatgtgtggggaggagaagcagattcctaagagtgatgtctacctactggtgaaaacggaaatgagacatagcagtctatagcaatgggaaggaaagaccatagaaagggaaggagtgtagggagaagaagaaagtttgagaagaagaaagtttgattgactttgatatgaaaatggttaatggattaatgttaataagaaaattacaaacaaccctttctgaaggctttgaggatttctcaggtaaaaaccacccatttgctgcctggcacatgacagccagtgtaagtggctgtgttgccaagtggccaggtcccagttagacaccaaataattcttttgctctgctgtgctttctctctctctctcctcttctccctgccctagaatgaaaatcaccaatcccatgcaggccacagagaagaatataaacaaacatcatgatacagtgccttgcagaagcaggatccctgagtccttcgtgtatggcaaagagataatttgtgacggtaataatttcttctctaaccagcagcatcttgtacctggagatcaggtggctgctcctggctctctacttttccctgtagtttgagccagctatacatcttcctaactgaagcactcataaggcttgaaaatgaagtcctgtagggaactccttctaattgccagagtgagtcactttcctctccaagcaaagaggtttctgttggtgacattagagagcaggcgcttgtctgtattgtaacagcttaattataagtatgggtataatcacacaatctgtcattataccttttttcaccctgagaatttgtactgcaatcaccataacactgtaacaacatgaacaacagactgtctggcctccctgagatcgtttcgtttgccatgcctggtggggatgagcaggcagatttggatggaagagcaaccgcctatctagtgtgtgtgggggaacaacacacacaagcctgaatctttcacagggcttcctgttcatttgacttcctctaaaggacagtcaagtccctcaccctccttgcagcctaatacacccccccctctggttttatctgtttgaaaattgcacaagaagaaactacccttctgctattttatacccaaaccaagtgaagtggaaattgcgcgaggaaacctatccatctgttatccctcagctcagcagtggatagaatctattacaatgtgcatcctgccccctgcctctgccaggcagcctgtggggtgacaaatgggtggggagagaggcttgggtctcagggaggggctgattgcctctgaaactccatccacggaactagcaaagccactcattacacagcacaaattgggcagacataaaaccacagtgcctgaggaggaggcggcagaggaggaaaggctttgccactgatggtcaggtgacttactgtccacaccaggggccccaccactccatctaatccctagccacgatcacaagcagagatgtgaaaagcccagaacccacttttccatgccccaaaccaaatttcaaagagctactgtctttctatagggactcaagttcaacaattaactggaagtgtgccttggcaatggctccagggcagagccctgtgaaactaacccttcttcagagcagaagaattttgtatcttgccatgcttcatatctaggaatcttgtgaaattagctggagtaaccctccctggctagctgctctgtttccatctgcacacaggcttctttttatgaggaaatggttgattgcttcctggacttgtcaaggatggaccatagaaccaaggctcatgcttcagatgctctttgtctggtggtaatgcctttcttctcccagaaattacagccactgtttgattttgaattttctttggtccataatagcgtacataacactagagatgccattctcactcttgggtgagagctctccctggcctcaaatgcagtgagaccctggattattgcatcacatccacccccaggcctcaagggagaaaaagcaattatctctttcctttgtttaatttttaatttacttttgttgccattttggcacagtctcaaactgtactactggcctagaactcactatataactgggactagccccaaagtcatagcaatccacctgcctcagcctccctgaatttgaattttatttttgttttgaggagatagtgtgtcagtctcaataattttggtatggatttcaactggataaataaaaaaaaaaaagctgggtgagatggcttgttcctgtaatccatctcacccagctttttttttttatttatccagttgaaatccataccaaaattattgagactgacacactatctcctcaaaacaaaaataaaattcaaatgctctataagatatgaaagcgggagacatgttaatgtcacatatatgaatttgttattctgatttcactggttatacttttgactgaccactgattcagtttgctttgtcagcaaagtttcttttctgagccaagtttctttctgatcaggcataaaagtaaaaacaaaatggagattgtctccacctatgtaaagcccagagtccactgaaggaagtagtcaagaaagtggtaaaatacagtgtttaagaatagggcaaactggactgggacaaagaaagggaggagagaaaacacaagtcaaaagggagagagaaaaatactgagattggttaaaagaaagtaaaaattgtttgtagcccagattgggatgcaaataacacaatggagaataatggaaatgactatctattcataaagaacgaaatgacaattgtcccaagacatgaacttaagatcatccagaatggggggagttgtgaaagagaggagaggcaatgttttcatgagggttctctgaggaaacagaactctctctctctctctctctctctctctctctctctctctctctctctctctctctctgtgtgtgtgtgtgtgtgtgtgtgtgtgtgtgtaagaaagccagaattgtgtgtgtgtatggtgtgtatgtgtttttttttaactgattggcttatacaattttagtgattcgaaagtccaagcactgcagcctggagagccagggaagagttgctgctgcaacttgaaaccaaaagctccatctggtcttttctggtgaaccttgggtttttatgctttgagatgctactttagacctcgatctagaggggaatctgtttttcttgagtccactgacttaaatgttaatcccatttaagaaaatggcaatagctagacttacagctgatcaagcatttgagtaccatggcccgggtaagatggagtataaaactaaccactgcaggcagtaaacaacttatgaagaactctgttaaactgggagtctgatattcattccaatagcaatagggagctggctgcacaggaacagggtcagtgcacatgagtgacaggacagggatattcttaaaatgactgtagcctgcaaccagaatacttggaacagtgcctagacagaaggagatgagaagaccagtggtggcactgttgtcatcttggtgaaatgaaacagttgtagggttcagtgccgtcagggagaacagagggaaacacacctaagagctgtttcacggttttagggaatctgatgaaatggaaccattgaaattttagaactagttaggaaggccaattgcataatttgcagatcccagacaaacaaaaatgtggaggccatattcaaacaggacttctctttgtttctggggtgacatgtcatatattattggttacttaatacattgcccctaggactaacagctagaaacctccatgtatcaggtaagtgtagacagacccatgctcacaacctttcttggagcagagagtaagacacaaaggaaccaatggagaaaacaatgtagatcatgccagtttgcttccaagacactggtgggtagttctgtacacagagaaaaggagagaagacatggactcagggagaagaactcttgcagcttggtttccttggctatataataagtccaatacttagacatatgcatttgaatctcaaagaggaattgtatgctaaagctacagagttgaacatagtcagtcttacagactgtgttttaactggtctaaactgtcacagacactgtgttcattcacagatgtttcatattctagaaggactagaacaatctgctgacccagattctggaaggcaaatgagctgttggagctaagatcccatatacaccacatgctgagccaacaagaggggcagacccctttgtacctcaagtgaggaaaggtcagtcccaatttcacaatcttgagatcagaaagacttgtctgaggtgctcatattttttgagccacatgaccttgcaatactgtttacccttcccaggtctggcaatttgctttgtcaaaatcaagacaacaaatacctttcattctgctataaggctgagaaagagtgaacaggactacagttatatgctgcagtgtcactacagaccttatgacaggggtagatctgtgtagctcagaaaccgttgttaaccccttcatgtagtaaggacctatgaaactactgtgctctggatgacaccgaggcacttgcttgaaggggtttgtgattgtaaacagccccttggcccaacttgatgaagggaagttgttttcctttgaaccaagcaaggtgacattaggaagccttatcattatcagcagctatccacggctcactgtttgatagaccctttttcctttctgccctttgatttcattgtctctagtctttctagcttcagcttcttcagctagccctgggcatcaggcacccagggccttatttattacagccacccttcatgactcctgccctatgtttctgcaagaggaactaggttgaggaaatgtaatgaggaatctaggtactgcaggtctgatgagatacctgcagcataatcaagcaaatcaaatatttggctctgcttcttccaatgatacagctcttcctgcaactgctgaatggcaggcaacttactgggcttgtactgagaacgaagagcataacagaggaaggaggggacttctctgccctgcgctgcccagcctgttccactgtggctacccttctaggtccctcttgtatattcaggcaaacatttgccttcagagttgtaaaatacagaatgatcaagagatgcaaggataatgatagatcatggtggcgaaaagaatactgtccactgtgaagtgttgctcaatctgtagtgagttagaaacccctttaaaggtcctgttaaatgagatttttcactttctatccagctcccaggtaatgtcagtgctgctgaacctctgagactatgttgaggaaacagatgcaagagatatgggtgttggctgaaatggacacagtttgcagaggttctcagacctggcccccaaactcctcagcttccaccaataatctagggaaaaaggaactctgagaagggccctctctgcgtaatggtgactagcactcactaaaggaagctgtgtggatcatggaaccatcatcaagcttgccttatagaaatatagtatgggtcttgcattctttctctgacaactctaaaaattcatgtagagttcagagcataatacttttatatcacatgtactctgctttcatctccttccttaaatgcaacttttatttatttttttagttctcaattgttttatttaaattagaaacaagcttgttttacatgtcaatcccagttccctctccttcccccctcccctgccccccaagcataatattttgattgaagaatatctgagatttcaaaatgatagagttgttaatgataaataaatttcctctcactgcgtttgggatcacccatatgattacaaatagcatgaattacatattttgtgtttgatgactttttttaaagtgctggtaattgaaccacacatttagtggatcgaaatggagaactaataagttgatattcagaagtcaaagtttacttcaagcctgtttatttatatagcaaaagtttatactatttaagaagtatatacttcccaggtacacctgaggtggaagacaaaggagtaaaatgctctttcaggattcaagcttaggcatagggaaatagctgataagaggttttacttggagagactatcattggatctgataccttacaaaaacaaaattgcccaaggattttcttcctttcattgtaagttttattgcaaaatatctgaaacaaaaaagagaggcaaataaatgaatggaccaatgaatcaataaattcatatgaaaataatgagcagaaatcagcaaagaaatagagttataaacaaataagattaaaggatataaaagagtatagattattgaccccaactaagaatccaagcagtggtggagaagatgccattgatgcccttcacctataatgagattgatgtctatcttggttaccattcctagagcctgcatccagtagctgttccaagaaaaaacaggcacccacagctaagcactgaaccatactcctggaatccagttgtggagagggaggagggatgagcaaaggagacaagacagtgctgcagaaactggcagaaacagttgacctgacctagtgagagcatggagaccctagtcataaagctggggaaacaacattggacagacccaagccctctgaatgtgggtgccagctaggaggccaagacagtctatgggacctctaacagtggagccagtctttatctctagagcacaaatggactttgggagcccattccctatgggggggatactattgtagcccagatacagcaaggagggcctaggccctccccgaaacgatatgacagactttgaaggtccctcgtggaggggcctcactatccctggagagtagctgggggatgggttgggggtgggagttggaggggaacatgggaggatgggaaggcaagggaatggggggggggatggatacataaataggagtagtaattaaagaatgtaaattaaaaaagagcccagagtactccagaatcaacagtaaacctttaaaaatttcacactgatacctcaccctagattaattaaatcaggctctgtcatgtagtatccaagtactaatgtttgctggcttcctgggtgtttcttgggtactaaccaagttcaatgttcaatagcctagaaggtcttcagcttccactagtaatattttgttcatattaaaaagacaaataacattgcattctctcaaatcttggtgagttttctagcagccttatattgtgacagcctcagaagtacatataagaatgtttaaatattaactgcattagaacccaggaccgtattaagctgtgagaaaaatgagaaccagacccaagattaccacatagaaattctttgatgatacagaagaggaaagctctacaaagaatccctgcatcccatacaaacccacactacaagtaattttccagaccatgggtatatggtgctgactgcttggagaggcagtgggttttaaccacacatatctctttcaatgacttaataaaacacaattaggttctcccactcctgaatctagaaactctatggggggcttccatttcagctctgggtgtcagaggtaggccagatggaatcccatcaactccgctattgagcatattgttcatttgaaaatagaagccattgggcacgtcatctgtacagtaatctgggaggacatttttcttcattctatccagtggagcatgcagaaacacctgtctcatgtcttagaatcgtttgcaactgctctctaagaaataggtgttgaaacaatatcatcaagctgctttccataattcatatacttggccattaaagaaaataacaaaacttggaagcttgcatcaccattttgtcagtgtagcatccagggcttcagacaattaaatgttttctgttcatgcttagaggcccgaatgtcaaatggtctctgttttcaaaccttggctaggcatctggaatgaagacattttagtgctaaaaagaagaaaatccagggaagataaggattaggtggctactgtcatggtttctagtgtgagcataagagtccatgcgcattgtccctagtgtgacagcttgaaagggtggggaactttgaagagaggccactggaagtggggtggccattgtgcactaacctcagaagggattagtgctgcctcacgaagtgaatttgtttctatgagcctgggtagtcataacagatgggccctgatcttaaattcttgtgactttctgcctcatgtatgatgtcccccactcccacccacccccaatatatatccatataccatggcatgactgtattagatccctcgccagaggccaaaaatatgagactatttaggcatggacttagtatggctcagtatgagaaagtccctgagaagaccatgtattgaatgtttgatccccagctggtggctctactgtaggaggatttggaaacttcgagaggtgtggtctcattggatgcagtagttcactagtggtatctctgaaggttgttattcatccttagtcctttctcagcatgtacttcttgtctgccatgaggtaaagaagctcctgagccacatactcctgctgctgtgatgttctgcccacttatgtgcaatcaagcaaccctagacagaactctctaaaactgtgagccaaaatataccctttcctgtaggtgactgttttgtcaccagggggaaaagtaataaatagattctcacccttcaaaactatgaactaaatgggcatctttttctaatattttggttaagcaacagaaaatagattgcacagtcatcatattgatatttgagtctaatgcaatataaagctgagtggaagggacatcggtcacttcccacgtaaagcacatcactcaagttaagttagcactgcaagacgcagccatgcagtttgctgaaaatctttctagatgatgaccaacaagaacactatttcattcaatgaatcatttgagagtggctctgggattctcagagcccagagcatcccaaaggcagaggccactctgatagtcatgcactttcctgggggagaatatatatgcattagaatcacctaagaagctactaaactacaggcttcacaggtagaagtcaagagtggagcccagtattctgctttttattgagtgagcaccagagtgattcagggacttagcaaccagtgtgggtgggtggtggggacagggttttgtggcacttccagaagagagttgtactgcctgcttattcctcattgcttttcaccaggagcagctgtctttatttatgtagaaatactacatagaatttctttaaaaaattattcctgtgtttttaaaggagagagggaaagagaaaaagctaaagcataatgatgaaaataagaaaacaaagaactctgcagaagtataatacacacctcctcacaaatcctctgccatatactgctattccctcctgtgggctcagtacaatgttctggctatatattctgtgtctcctggcctgctttctgacacagcatgatgcaaagcctggggcaacaaggccaaagttgtagtttaattaaaaaagaaaggggaaaataagcctctgtctaacagagatgaacaaaagaaaagtccccaaagaagacaaacttgtagaccccaacaaaatgatgactttcatttatagaccacacaattcaacccatgtagacatcaacagaattatgtttgataggctggtacctaaggccagtttcaggaggaagcaactgcaaggatacaggatgaaggaggatggaacccaacttaattagagaatgtttcaaagcctgagcagaaccacattattcccagagaagggtcactagagagcagggtgcttcacagcgcctttcatgcaagtttaaagcccccagtatagtttatactctacacaaaacaccttaatatcgcccactagagtagtagtctttattattttacttaattattcataatgacaataaatgtctcttcaactgtgttgtttggatgctattctaatatttgtaaagggcacgcaaggttcacccgggaacaggaagtcaagttctgtcaagttccattgtacatttttgccaactcattcttgcatctttgtcttccagatgtgggactgcagcagttcagatgtggaaatgaagtggttagtgaagaaagatacatatagacagtccggaaccaaaagaattatgaaaattaattttacatgatacctggaaagaaaacctcttcacatgattctggatcagtgtctgcttggggaggcaaatgagccaagccacatgtcattgaagaagaggctgaagcttggaataagggctgatcccaggaaatgtagctctttgtatcttagggaaaccagcaacaggtgctgtgatcttctttatcatttaaattagttctccaggctgctaaggcaagtgtgggtcatgtattgaaggcaaaaaaaaaaaaaaatgtgggaaggccactggtaagtgtaacttgtgggaaacaatgaattaacagcaatttaaagagagtctagttaacacaaagcaaaattcagaaatgatcataatcagaagaccaggagttatcatggtggacatgccctttgtcacccaagaggaagatctcaatcatggctgctgcactcctttggctgtctgctctccaaggaaggtgacaatgcagttcctgacttagaatctttccttggagatccatcctacagtcaaaaggcaaggaaatgatttccataggaaatgatttttctctccaaaatgagcctcatgcttttctgctggttgttagtgaacatgactccataagcaaggagatcaccatgtgcaggttattaaacaaatcctgactggtaaacgaaagaatcaatattggatatgttgttgatttcttttcaccgtggcaaatacatagaattgcaatcccactttggtttacttagtcttactaggctgtatcgggaggtgttttattggttttccaattggtgaggaagaggttaagtgagagggtaaggggaagagcaggttaccagggcaacccaggctcagttatgctgaagacttctgaagtgggttgtagaacttagctcagatttgtcctctctgtatgacaaggaagataagacattcacctgccatttgccattgccaactgtaaaagaggaaactctccagcattgtgtcaccatgggagttctggggaaactctagcaatcaaggaagttcctaggcagaaagtggccaatgctcatcctgagaagctggctacatgcaattaacagtatgcccctactataaagcactacagtgtatttaggaagataataagaagtaacaattattgaacatttcagtgaagggcaacatattaggattttttcattgaaccttcacagtatattacattaaacattattactattatacccattacacagataagagccctgaagcatgcaagcattaagtaacttggctgaggttgctccagatggggattggtagaggggagtgagcatcaagcccagccaggttgctctagcacctgcactggtaatgcttctctattgcttccctgtatcactcatgaatgttccaaagaacagtatgaacagcatacagggatattcttgcatcaaaacaaaatctcagagagaggctttctaataccgagtaaatgtggattttgtatgataaaattttaattcaaaggaatatggctctgataatggaggcaccacaagtcacacccatggtaccatgcctgaagagacagaaggaccttcagctactagagctcagaactgaaaacagactctgagcatcactccacctagccacacaactctgggatcaagagtatccagtccctgtactatggtgcgattcaacaacgttcccattaaacaaccagaaagccagcaaatgtccatgaagaagaatgtcaatgtctatacaaaatccaacaggaggtctcttaaacccatagtataacagatgacagagggcaatgcagcccacactcccaggagtcctctggtcacacctcttgaggaatgcacctatttggaacttagaaactcagaggagcagcataaggattcccttaatgcttcctgttgggattagcatcaacctgattttgcaccaacacttagctttattcgttctttgaacttcataaatcaaatgtgtcacagagaaatttctgggcatatgaacatgaagaaaatgtccacaaaagaaagcattagaaaccattctgagtgaggtaacccaatcacaaaaagacaaacatgatatgtactcactcatatgtggattttagacatagagtaaaggattaccagcctacaatccacactgccagagaagctagtaaacaaggaggaccctaagagagacatacatggtcccctggagaaagggaaagggtcaagatctcctgagcaaattgagagcatgggaagagtggggagggagctatgagaatgagaagggaagaagaggaaggatgcagaggtcatgagagagcagaatggttgagtcaggggggaagattagaagaaagcatatgtgataggtagggttttagttgggggggtggtagaggaggaagggagggagaagggaactgggattgtcatgtaaaacaatcttgtttctaattcaaataaaaaaatgattttagaaaaagcaagttaaaaacagtcttttggaggcctgcttgatggcccagcaggtaaaggtacttgttgccaaagtatagcagcctaagtttgatccccagaatccacagggtagaagtagagaaccaatgcctcccagttgtcctgacctctacagagatgtcgtggcataagcccacccccataaagtaaataagtaaatgtttaaaagaaataaaattataaacagcccttctttgagaaagaaggggtttttaacttttttttcatgttgtttacagggcacacacacaccacacacacacaaaagtgggggagggcacttgttgagcgggattataaccagaatgggagggagatgatgagagaggaatgagggtgaaaacactaaaatgcatcatataataacgtatggaaatggaaaatatttcagagaaatttttgaatagtctttcttatatgatgccactttcaatactatttaaatggagagtcaggaatggatagcaaaatagtaacagatgtttgtactgcccggggtttttaggtgacttcattctgctttttcctttcatgttttttattgttctgcgatacacatgtgttctacgggtcagcacatgtttccccactgcagctaagctgcgggtgaggtatactgtaacatgacaaactagagaatgatacgtgtagtggtcacgagacagcctttggtctaaagagagtcctgacctggttctcccacagttagtttggggtcttggcctcttagccccttccattcttttatgtacaaattcagaatcaccagcttgcacaagacacccactagtgtttagggtaattaccagtctctagcatgttttcactcaggtagagtgggctaataagtcatggagctcagaaactgcccatgtgagagaagatactatcggaaacagagtaaagggaaaagtcgtggttgagggaccagcagccaggcaagacagatcagggaagggggtgcccctgtgctattccaatcagtcatgcccacagtgagcctttcacagcactgatggctcggttagactggttgtccaaacattaaaaggagatttccaaagaaagaatctttctggctattcatttctgaagacttacagaataacgggttacaatgtgttgtggtaattacataggaggctaactgctatttttcttgataaggttgacccttcgaggcctgccgtgagaagctaaacatttctacagaaggatgtgcatggtcctggcatggtgggggaggggcatgtggagtttggtaccactgtcggtctgtctttcttttctcttttctttctgctgctatgacttctgctactgcggctgctatttgtttttgtaattgttcttcaaaggcttgcggcaagaaagctgttctaattgtgcaaatcacagaacagctgatcacaggagcagtcccaagtcatctgtgctgccattgactgaactttcaaataagctgggggcgcttccccaactcccccgagtccagcatctgacagtgaacataaagcagccgccaaatgagatgctgaaacagttgtgagtcaccgtgccagtgatttgatctgggcagtcagcaatcaggctgccctgggctgcagagagatttgcactacactgatgcaggctcccaaaggcaggcaccctgcctgacttgttaccatggttcccagtgcagcctggtctagtgagattatgagtcttgtgtaagcagttaatgctgggttcaaatctatcctctgaagctaaagggacatgagccaggcaaatcacacagaacttgttaaatggagcttttcctgctgccttaaaattccagttaaagcccaagaagcgacaggtacctcccactgctcatccatgcagagctaaggggtggcttaaatgacttggtgactcatagctcatcaccacaaatgagagcctagggacaaattgaggagagtaatcagagtgcctggcatcggcatcagaagaacacagttgtcttaggaaagtccccaggagggggaagaacaagatgctttcccctgctccagtcattcgacaaatttagactctcccaatcatgttccaagtacagttcaaagtactgcagacacagcagtggagacaagtttttattttcatgagtcggaaaggctcccctgaagatgcacttagggaaatctgagctaccagattgaagggaagccagtttcttattggtacacccagccacgcagcaatcagaatgcttggagcagccagcccttccagggttgaacatggaataatgtgtgagtttctccatgagctaagtaaagcctggagaggcaggtgggcatgaattgtccatgctctagaatggcagcactttagaccaagacataagggattctcatcttggaccttgggctcttaggtctctgctcttcctctagtaatgttcctattggtgacacagttcgtgagaccactgggacatgtccaccttaaggtcatgctcactagagaccatgccctttctcagaacatgaattaggctattaactaaagaatccagagctaaaattccaagttgcccaagtaaaattggtttctgagggtcaatcacatggctagaaaaccagggatactcaagagccaagagtcacccttttattaggagttgatgaggacacagagctactcaagggaccccttcaaggtagtcaagggcaagaacagggtggacagtaggcttcagcttccagcttggagctcagtgtccagccagaattctaaggagtatgggaaatccaagctaaatcctgtctgacctttgatgagggattccttctatatatatgtttctcttactggttgatgaataaaacactgtttggccaatagaggcaggaagataggcaggactagcagatgaggagaattctgggaaaggtagacagaaagagatgccatgtagcagaggaagaggtaacaggtctggacccttctctggtaagataagaccacatggaaatacgtagattaatagaaatgggttgataataagacagagctagccaataagaagccctagccattgcccaatagttttataattaatatagcctccctgtgtgttcatttgggtctgaagcagtgagaccaagctgaaacgaaactcaagcaacagacctactaggttatcaagaaagcatggtttttaagggtagggaatataacacattttattagaccattttaagttgacttagacctttaaatgggcctgaatacttaaagtttggggatttgacttagatcttcaaatgggcctaaatacttaaagtctggggttttgtttatactctagcagcctagggtcccacaaatgtgataagtttggctctctctaaatttatagctgtttgaagtccgaaagatataggtggagagacagagagagacagagaaaaacagagagagacagagagagaggaaagagagagaattcctactactccaaaagggagggataggaatagaaggagagatttggcaggtggataggggaagaaagtcagagggtcagagatgaagccatgaagaaagccttccacatggaatgtgtacataggcctagaggtattcaacaactgagaagcctgagcatcagccctgccaaatgccactgaggtctgccccttcttgcttcttgttgatttagccccagagaaagaagtgccaactggacaacccactgagtgttcctcacagctctttctagagtctgggtacagcctgaagttgggtggggagagggtttatttgaataagagtttgaagtttggtttagatttatttggactttgaaaaacccagaaatcatgctatttgaatatagaaggcacctctgcaaactgtaggactggccaagatgtgtttcaatcggtgggaacacaagattgaactgcagggatgataaggaagggacatcatcaaattcacttcagcacaaaccatttgataatgatatacagaaggtgtaaattgcaagtggcacacacccacttgcaaggatgctatgaattcaaaaggaccaaagcagatttatcttgactcatggtgttggagggatttcggtccatcatggagaggagagcatggcagaacccagtccacgtagcaataatgtgagggagacccttctcatgtcaatgcagaccaagaagcaacaataaacctaagaaacagggaccaacctctaacctcctgttcctgccctcccaacctagctttgccagtttggaccacgaattttaaagagtaggtagcctcttgttgtacctccaccagtgggaaattgctgcttaaaatgtgtgcctgtgggggggagaaattgggattcaaaccctaacagcatgtttttcccaacagttattcaaaaaatattgatattatttattacatgagtgtttgcctatgagtatgcttatgaaccctctgtgagcagtgtccagggaggccaaacagaggactttatatcctctggagctgaaatcacagatagttgtgaactggcatgtgggtgctgggaaccaaacagggtcttctacaagagcaacaagtgctcttaaccactgagccatctctccagtcccctcccccaataaacttttttttttttttggttgttgttgttgctgatttagagacctggaatttattgtttcttttgcaaagctctttagtcactgctgacaagggtcctccaacttcaggtgttttcagttagactcttcaaagctactccctgtaggcccttgatggagcctggaggctatagtcattttatattccatacttaattagcaactcaatgagtttattgagatagcttccttattctgactgcaggttagagaagcaagtgcttggcccaccggcatagctgtattaatcagagtgagattgagccaggcctgtgggctctatagagactacattttaccaccttttaactacagcagccactggggtaaaggaagtgagagcaggcagatcttgaaggaggacttgtctcactaaggacaagtcccccctgagtcctatggtcctgacgtgtccagaacagctgaattgtcttaagattcccagtattaactctataccttttttaaaaaacaaagaaaaaaacctttcttttcatttattgtatgtgtcttttatatcaggtatcttgatcccactcattttcccatctctttgcatctgccctctatccctgcacctcaattaagacaaaacttaagagaaaaaaaaaaggaaaaaatttaaaatctcatcatggaagctgcagtgtggcacagtgagtctcacagtaaactcctttgtccatatatctttacttggaagtgttcgttgcaaagagttattggtttggttcgaggcctctggtttctgctacactatcaatgctggatcctcaataggactcttcttagatatcctgctgttgccctgcatcttggtgacctgagtgggacaaggacacccacacacaggcctgaggttgtcggccctgggctctgaagagaaaacatgggcccacctggtaccttgcagcaccagcagatagacactattagagtgagcaggggtatggtatggtgtgatacaggagagagagggagacagagcagggagagagggagagagacagagagcgagagagacagagaatcgttcaggtcctatggacatctgaagagacaagagaggaagggaggaagcaggctgagatggtgaggaagctgaccccttgactagctgcaatacttcttctcccccctacccatcaacacctaaggcaggtgggagagttgaccctgaggtaacaagagtgggaaagctgtccctgcccctgccccgcccccaagctgcaacacttgggagagcaggccctgtacctctccagggcagcacaatagagccaaccctgttagtgaggtatgcatgaacatgggtagggggaggagaagggctttttccccccagcccatcccatcatgtggcagaagaggggtggagctaggtctcccatgctcacactctcagggttggctcacctgtgctgcacaaaatacagagctggctttcccatgtgttgtatctggtcaagtggtcagctccctcaccatcccagcctgcttcccccctccttgcttgtctccctcaggtcaccatgacatgtgctgggccatgcttcctcatctcaaagagattattgtagtgctcagtcacccagcaccatagattggtgtgtttggctgagtttcgcccaccatggagcatggtgtggggtaggagcattgctggattccggtggcagaccagggttagactccaataaacatttcttaagcacctgctatatggctgattttaagtctgaagatactgaggatgtaaagcagatgtagctctcagtgagctcacattctgattggtgagaaaaacaagttaatgagctgtaattgtgcagagccataaagcctagaagagcctatagaaggaaggtgtcatgagacattgtgggacatcccacacagatacatgagtcacaggagatctgctcttgttagtgaagtaatgtctacctggaaatctgaaagacaaatgaagttaggccacagagacagaaaggaggtctcagaaagaagcaaaaggaagcagttctctaaaccaagaagacattctgttctggtgcatggaagaaaaagcataaaatggggggttcagtaaggctggagggcagatgggttgaggcaaatgttgactggtcagacttcacggttttgtagaaaatcatggaggagcattgacatcctgctaagtctaaggtattgaggtttcccctggcacagggattgtcaaacacatatttgcatttgagaaaaatcacttccataggaaggacactgtgtattagctgcttccctctggactgtgacaatatccctgaccaaagcaacttgggaaaagaagtgtttttgggatacagttcaatgatctaatacataacagtgtgaagtttcgtggcaggaacctgaggcagctggttatatggtattcacaggtaagaagaacagagactaaagttagtgttcagctggctttctccttcttgtgcagacctggaccaaggagatgggatgatgctgcccacatctaggatgtggcgtcccatttcaattaattatcctaatctagataatccatcacgtgctgtccaaaggcttgtctcctaggtgattttagtgccttttaagttgacaatattaacagtcacagattgctttaactagtggtgggaataaatagatctataaagctaaaccacaggtaactagggaggtcatctcagttttaacccattctctatgccctgtgcacaggctgagaatattttcatgtgagtggtatatttaagatttgatttctgaaaatgatgataaactatggtaaaatgtggaatataacaactgaataaaatatcaggagccaggtcactgctatgggaaatcaccagtgaaaaacacaccaaggaaactggccatgtgtccataaactcttgccgttaatgcattcttacttttgacattttccacaccacataaaggcttccagaagaaaatataggatcttgagataggaatcactaggagactgtcaataaatgttgcacagaaccttggggtcagtcatgtgaatatgggtgacagggtctagttccagaatcagctggaaatgtgacagttgtttagagatgataagaaggtagataagaagggaagctgcatgatttctaatgttatactgaaaaaaggatcttaatattgtgtggtatgttatgtccccttaagatatgacttagaatatgaagcctgagataattacctattaaaagataccaacacttaaagtatagacccctaactcaaactgtgatatttacaaccactcaaaatttatattgaaatctatacctaaggatggtattaggaggagagtcctttgggaaatgaggggcagagctctcaccattgtgattagcacccctatgaaaggaacccagagagctggcccttccttgtgaggtggagtgagaaggcaccgtctacagacaaggaagtggtccctcaccagttactgaccacagaaacatcctgacctcagactttccagcctctagaactatgagaggtaatatctgcggtttactaatcatatactttatgacacttcttattagcagcctcaaaggacaagcaaatcatggcttccacacatcacagatgcctcagctgtcaacagggctgtgagctagacacaaggaagtttgtagaatccctgaagaaaacccatccgtccctatgtccccatacaaatgccatgtctggctctgagctgaactaaaagcctctcatttccacagatgtcaaatatgttacgataattactactatggttctttattatacttcaactatattcatgtagaagatgctttgtaaagtaattagtattgtaaaaatgcaatcactagaatttatttcttgaaacaattccaaatctagtataaattcttaccatgaccgggagaaatatatgaaaaccagctagcaaaaggtcttatggggtcaaattgtggatttctcttgtttttcaccaagactaagccataggcacaagaaaagatggctcagagactcaaaggcaatcttattttgttggagggactgggataggcagtatatgcctttaatactagtacttgtgctgcagaggtaagtggatctctgtgaattctaggtcagcctggtatatatagggagttccaggcatccagggcataaggagaccctatctcagaaagaagagaagaaaggaaggaaggaaggaaggaaggaaggaaggaaggaaggaaggaaggaaggaagaaagaaaggaaggaaagaagaaagaaagaaagttctctacctggtaattattggtgatctgtgtatacatgaaatggtttatagtagggttttttttttttttattcttgagaccagaattttaattctggttctgtttctatagtagacacatatcatgatggcattgccctctactaaatctcaagttatacaactacaaaatggggcaaataacagtttcctctttgtaggatgcccaaatcatgataggtgattctggtgagcagatatacaactgagatgctaaagcatttacagtatatatatcacacagtaagagtacaaaacaacaagaaactctttagtgttttatagtaacctaaagggattaaacagtcaaactgtaacttcgctgtaattccttattgctagcatgattttataggtcatgtcacaaaaggttaaatgatctgagagagattgctgcattgaacgggaaaacgtagatgcaggctgaatctttcttctgctggctgtgtgaccttaaacaagtcacttgacctctttgagttttagcacatccctgcctgtaaagggaatgatggtgtgtggcctttctatttgctaggtgagaagggacattaaaacaaggtctctaaaagcataccaagctgcaaactactgggaggataaaaatttgtgggcttttctctctctctctctctctctctctctctctctctctctctctctgtgtgtgtgtgtgttattatcctttgttttgtaagagatttaaaacattgatttatgacattaattatagacttgccagaagcctgatttgggaaggaaagtcctgaagaggactttgcttgtgatgactctgtcatgggtctctctgggcctgctcccagagagctaatagactctgccatgtactctaggttctccagcaaaggatcttccacttgaggttaggtcatgggtggcattctagagtacacagtggtctcatagtctgacctgtgcttggatgacttagtcctgagatataggttgggctccatttgttactattccactgttataaaaacggaagaactggagagcacctcttgctggagtgtaggtcagcttagcagtatctcatgctggcaatctaagagcaaagggcacagcacagtatatacactttgtgagtatgtctttgagcatgttttttctatgacattaaacatttatgaagctaaattctaatggaaaactaatatgatttgtaacctttgctggaggccagctatgctccatacaacctcacataatccatttccccctgagtacaaactaagatggactagaaagaccatctagaactcagaatgacttagattggaagacagaaagcctttggaaggtgacatgcgattatctaactaaagcagaaaataggaagaatgttaagggaatcgtgggctgtggaatcactggaagctaaaaatgcgtttcagcatcataccttagcaggagtgtgtcacatagtcacttaacctctgtgagtctaaaaatcacaggcaggagcagctggcagctgcactattgttctggtaatgaaatgaactagcttcactagtggcacagaggcctgagcacaaagatgaccaccctcggtcctatccttctcttctggtccctctctgcccaaagaatgatagcacagagggatgtggaggagctcattaattcaatgagtcctaggatgacagcagaagtagcattgaatagtggttacaaatgtggacactggagccacactgccaggctccaatcttgcctctcagcattctaagctgtgtgttgtctaaactgagctactccttgcttggaatcttcataggcagaataatgtctgtgtgccaaagacacattgggtccacatctgcaaagtgcttagaacctggaacatagcaagtgttgcatacacgtctatgtgctggagtcccatctacaccagtcttggaatgatgacattcagcagacctttctcttcctggaagtactctagttgagagataccagcacttcaaaggcaccatttggcctcatttcttgactgacagcttcaaaaccgagtgtgctgcacctcccaccattccctggtgctacataaatctttatagaattggattgtaaagagccaagtattggaaaaccgaaaccctaataacccaatcgattgcttgagagtagcccgatggtgtttctttaagccagctgctgtaacagcccttcaccttggacccgggaagcagagggtaatgccatcctgcaatttgcctctgcacctctctggctgctctcaaaggagtccaaaagaccaagttatttgtatttagcgacaattcccagatgctggcacctatgccctctaacatagctctaggttgtgtgcatctttctctgtattagcagcaagggaaggaggaaatgagaaacaacgatgctggatgagaaatgccacacttggtttagccacacctaagtcttggtttggatcaagaaaaaaaagaaaagaaggaaacagaaaagcctttaaggacacaaaggtacctagaaaaagctctccattccttccctttccttgagccctgtgaataaaatccaaggccttttctttccttgattgaccacagattaaaaactgatgggtaaaatgtctatggatcatagtttttttgagtcacagtctgtattttgtagcttaggttggagcaaagcaggctgtgccacaaggtcctcacccccaagagggcagtgtcacaatgcctgaagaaaggagtacttggagtctgagccatctgtgcagggaaaagaaagaaaaaaaaaaaactcctaaatgctgtttcaagcaggtcattatacttacccttatcttttgtttcctctcttcatggtctggagccaattctgaacaagccagtcttaaggcttgtttggattcctctgcactcagctctcttaggcccttaaaagcttgagaggaaacatttaagaggcatgattgaggccagctgggctgcaccccagccaagccacgcgagccaccctttcccatgatcgattctgattgctgcggctgcggggatcctataacggtcagcaaagacgactaaggtggctggaaagaatgaggtggtctggccactgtccatgcaataacaccagccctggaagtgttccttcctcaaagcacttctcgtgcagacatctttccaacatttgccaaaatgacaaaaatcaccttaaagcaaaaagaggaaggaatgctttaaaaggccatcaaatgctcagtctgccggccacaattgcctggcacatttgcatctgacgctgaatctcacctcccatttcactcactccattggctcccaaccagcttgcaatttggaactcccagggtgtggtagattgcaaaaataactataatccttcatccatctctatgctaaatcattgtgtactatggctttagagcttgtcttatgaagaggcaaaggctctttctcctcaccttgaatctgaacttgacttgtacttgttttacctactaatgtaagtatgctatgtccacactcctaggagaagcacctcaaagggtgcttctgctgcaagggatctctctctctctctctctctctctctctctctctctctctctttcctctctttctctcagtgtgtgtctatgtgtttgtctctctctgtataagtttctttgctatctgattcccatgtaaatattgccctagacatcctgttataggatggtagattgtgttaatccatttttgttgctgacataaaatatcagatttatttagatcattgttatggaagctgaacatccaagaccagttcccatcaactatcagccattgagaagactttctgtctatatcacagcatggtagagattatcatgaggagactatgtacaagaggagaagggcattcacatggcaaagtgggaaataagagagatgcagggaccaggctcgctggttctgtaatgatgtgtttccatggtgactaaaaaggaccctaaaggatcattagctaatcctttctacatgcagcacacccagtgatggacattgcactagatccctcctgctaacacttctaccacctttcaataatagcatgctgaggatcaaacatctagcacgattcttggaaacccactggaactataccctgattctagaaatcccatgaggctgcccttagtcaactgcttccctactaaacttgcaactaagtgcacacacctgaaataagaagggttggcccaagctgcatttaccaaatgctctttattttcttaaatctctagctttgagggtagcttggtacaaattgcaatagcccatctcaaaggtaattcttttcaataataacaaaactaccttttaaaaaagaagagagatatttttaatagagggcacttaggaatgttctgatgtacacttctgattctcacctgccaactcagtagccccagtggtctctaggcaccctgtaatgaggaattcccagggtttccacagtatgtaagcactgtttcttagaaactatgtactatgaggcatccattggatgacgggaaccagatcccttccattccatggatggtgggtctcctatagagggaagtagtcagcttcaagtatattgagagagaattcttcctctttagggcttatcttaggactgaacatatgagaagccccaaaggtagcagatgtcttgagaagtagtcagccctcatgccagaccatgtatgatgtttgtgtgagttttgtgcacagtacacaaatgatgggagatccctggcatttatggagtacctactcttcatctggcactgtgctgtgtcttgtgcttttgatgaaatctcacaaaggtcactccgaggaggctctgttagcaaggcttcacagatgagaacactcaaatctcaaaaggttaagttgccccaggtcacacagccagcaagtagcagagctgcagcttgtccttggctgtcacaccatgatttttctaatggaattgtccaaagggtaggcttctgcatgaggtagtcaaggttttacaaacatttggcttaactttttcctctgcctaatttttgaaagactaataaaaatccatacaccccaaatatgctatattccaacaattaacaggagagagaaaaaaacataattatcttttgggagactgtctagttggcattcatatgtatattacttgtagactcagaataaggcggcactggaagtctatcaggatacattcaaatgtctgttatatttgccactgattaggaaacttgaagttcattttcttcttagtcatttttttttatttagatgctgcgcacacaccagctaatgtaagtgagcatgctactttgtatatggagaattttcttttaaaaatatttttttaactatgtataggtatgtgtgggtatgagcacacaagtactagtgtctgggaagatgagaggaaccaaatcccctggggctataggaagcggtaagctgcccaacatgggtgctggaaactgagctcagatcttatgcaaaatctgaactttcttttaaccagtgaaatatctcttcacccagacaattttcttaattaaacaccaggcatggcataggtaagtaagcattgccatacatttgacctattatggtagattcctataatggaagtcttccatcctctagatagtttggagtgttttcatttgatgtctgtagttaagttgtgaagggttagcatttgttaagaaaggagcccgattgaggatggcgaaacagctttagtatctagcccaattcagtgtggtagtttaagaaaactgattgaggagtagctgatgttgtggcaggggtgactgctaccctcgggctgacagctgccaccgggtattaggacagatgaatcaaaggctgtgagaggctctctggccaacaaaaccagccaaaaaaacttcttgaacaacccatgcccccatctttattccaagaagaagaaagactgaagaaggccaaggctcccttacatgttaaagtagacagttaccatccaagatcagaaaaaaaaaatctgttaaattaagaacagcagttccaggctcaacactcctgaaccccaggttcagtgagtgatttatgttatattcaagaaaaaacagctcaattgctcttaataattaattgaactataaagcaagttctcagcaaacttttagggaaacaattcattctctattttgagacgttcctatgggcatctagaaagagtgtttgcttggcagtggggcagattcacatttggaactaactgcttgcccacttcaagatttggcaggtcagaaaggaaactaaactttcaggaactgctctttgaggactgtaatccaccatttctcagaaggctgggggagagagataagtgtaatttcctgatgcaatgaagatctgtatagttctgctcacccgcccccagctcaatccaccatgtcaattggatgtatgttcttccttctgtcttactcacaacaaaatctataagaggagaatctaatgaactaaacccatcctgtctgcagtcaattgtcagctagtgaggcaatgattttaatgttcacaaaggttttcacctgtgtcattctagagttagaatctccgaaagttctacatgattaggacagtgttccttctaacatccctgaaatcactcacttacctagataatgtgtggcattatccacagtctaggtgaatgatcttgtgttcacccccaaggttgtccaagaaatctggcaaaaaggcagaaggaaatattgatctctcatactgactttttaaagttatgaaggaaactaaactttcctcatacttaaaatgtagactgacactaacaacctatagtatttagatgccatttgtttattcttcacttagatattcattccaaaggggtgaactagtgatagccttgctggcagtgaattctgtgattttccatagacatgttctgctgcacatgggatcaattctagagaacagcctgaagtcaagcatgctcatctttccatgaatacaaataaattgtcagataaaaacatccccagccagtccagtgtcccatctctactgatccaatggcatgggaagctcttcatggccagctgccatttcttggttctaagtcagtggggctcttgtgtcatctggtaggattcaacctctggggaaaaaaaagacttcttagttaacaatccaagactttcagtaaagagaaacccaatttcactaatgaattacagagagtagttcctctcatctctacgccttgatcattgatccgtgttttcaaactatttgagaaaacaataacatggaatagaggatatttcacaagacactgccccatcataacttatccatgaaatgtttttcccccttttctcaaccagtgctattctagagccttcaatatccattccaatatttcttaggcccaactattttggatgacaaaatacagggtaaaaccagttatttccacaggtatagatgattgcggtagtagctcactgaaaattagtccccagtcataaagagtacagagtagaatactgtggcagtaaataaaatcaatgtagtggtagcagtagagcattgcaagcagggaagtcaagccaaagtatattctggaaaaatctaagaactgttcatgatgtaggaaatccaaagccagcctgttatcagttggtcaactcattcttctcagcaaagatgctacattggaacattagccctggctaattaggtattcattagaaaacaaaacaaactctaatgtgctgaaagaaaatacagttttaagctcatgaattaactatgtaatttattcatttttgagcccaatgagcaagaatcagtgaagggtggcagggctacaaatctggccagtacccacccagcaagtcaccttgaccatctggttattaagagtctcctctataatggttgttttttaggaatcatttgtagaaagacatataaaccttcaagttttgtctttatgctgacagttctttctaaacctcttcttcaggccttcttagtccttctaaatcattgatcatctagccaaactattaggctatttgtacaaatccatggacgtccatatttctgccatgccttctctagaaaaagtaaacagccagaagacacactgctcattctcaaaattcccattttttgtgtgtttcagacacttctgaggtagtcaggattctgagaatgaacactaacgatcctcactcacttttaatcctgtcacttttatgcataggtgtggcttatgacaatgataaaatattgtccttatgatggagagggtggaagtgactgcgtgtgagacttttctaaagcacaatctttgctccagttggtggagcaagaggagatgagggaggctgagaggatgagaggagtgtcctgccactgctggctctgagggtggagtgtggcagaaggatgtagtgggggcctatagagctagaaggaggctgcttgcctgacagcaacaaaagaaacccagcttcggactggttgtaagacacttgattctgctaaaaaaacagaatggatttctaaggggatttttttccaaagatatcgtgtaagagcctacccacatgaacacattaaattgaattttgccttgggagatcctaagcaagcctactggacttccattgaaggaaaccgtgagacaacaaataggtggcattttaagctgcaaagttcataataatttagtagttaacaataaaaatgaatgtggttcctaagtggagatataactttataggtttcatagtccagaaagtactgaaatttgtgctataattgttttgtctcagtcagttggtcatagacagtgcccaggaaacctgagatagtggagcaagatgagtggtatgtatgagtttgccaggactgccaaaacaaagtatcctgggctaggcagattaaataacacccattaaaatattgagtagttctaggggcttgaagttaaccatcaaggcttctacctttgtaaattccaccttttcttgtgtctttcatgtggtccttctgttgtgtatcatattcatgatattttttaatgtagctacatttcttccccttttaaagactgcagaaagataggtaagagcgcactctaatattctattttcacaaacttcttagatcctatctctctagagttatctggaatagtaagggttaggggtctcacctatggatctgaataacacagctaagttcataataaggtactatcaggattggagccacctgctcctggagtttacctgtgccttctgaatgtgtttgaagctgctcttctctatgcaaggtgatgacactcttataattggatggttttgtgggtagcacaactcccagctgatgataggcatccatttacccagaagagacatttggtgtccaatcagctaatattcaatatctatcaaatcgagtaaagagacaagaactatttttcaaagagaaaagagttttctatagagcaataggctttgctttagattccttgaggtctcggttgcgatttccctatcaagactttgagacactgcacaattcctattagttataaatacagagttcataatggatctatggtatcaccagccaaggagtttccatgaagatgcaacctgcttcagggtcttgtccaattctgaactgcttgaaaaactgatgccttcatgtgaacaaatcagacagcacaagcagtagttaaatggtttcattttcaagaactccaagaagttcacttagcaccataactctgctggagagatggtttgaacaaaattaagaattatgtcctttatgtatctgtatatttacaaagaccaatatagaagtatattgagactaataactggatattgctgcagcctttgtgttaatcaaaaatggtgtgtttctaaagcttaggaatattgtggaaaggggaccagaaataggaaagccagaggatgtgggaatttcctgtgagattgtgtctcctaataatctcagaaatttcacccacaaagtcccaccaacatgattgcctgaacatgagctgaacaaggacaaaaataatagacaggccaaagtagacagtggaaagaccacaaccctacacacacacacacacacacacacacacacacacacacacacacacacacacacaaagccctacagataattaagaaatcaaaagtgggagagtcagtccatcccagggaagagcatgccaattggtaatctaatatcaggtgtatgccctacagccatatgcatgaagataacattatacaaactaagcaggtaatgtatgtatgtatctatgtatgtatgtatgtatgttatgatataaacatatacatataaccacaattaacaaagaagggggtcatggatttgggggagaacaggaaggatgggaagggaaggggagtatgatgtaattatagtcttaaaaaataaaagcaacgaaacaaatagaagaagaaataatattctgttctaatggatttagcctgtagtggtagtagactgtagaccccagctgccacatctttgtcagggaccagaattgaataatcatttgttcacttggtcctggggaaagtcataggaaaactgtgaagagacacatgggtctacttagaagctctaactaactgttgagcccagtgctgagcttgactgagtttctctttgcctggggcagtgagaacacaaataggcaggagagaaagatccccagcacccttgacatctaggagtgtttaagggaatggaattgttttgaactgaatcttgtcgaaaattgttaaatttttaaaatattgtgaccatatcaccagaataatgaaaataaagtaagcacttaagcaatcaattagctctgccaattaatgatcaagtgctttctatgatagatacaattccaaagtaggcttgatgacagtatgaaagcctatgaaataaaacccttgagattttttactcagctaggcaatgttattgatgcacaggaaatgatgggagaatttatctcttaaattttattttccccaagtggcaaaagagagagataatgacattggtttgaacatttttctggctgtttgcaaatatttgttctcttacattataaaagatatagctttttgacatataaaaaatttcatggccttatatatttttttcatacatcaaaatttcattcaacctaaaattgtgagagcaatttgtgttgtgaatctagaaaagaagatgtcttcacttttttaccaagtttggccagagagaagcagagtcaggaataaaggagtcagacacccaggaatgtggcatttggaatgactctgtgacccctcaaagcttccagagagttctagggatataccccaggaatatttttagaccagaagcatatgtgtgtccccacatgcaaatcccttgcagagatatgttcctgtttggcttctgctctgtcccattcatcacaaagcaagcttgccaattgcttcccagatgttctcaccctgacccagaggtgcctcctttgctgagaggctgcagcaaatgaacctcttccatccctggcatttccagagcaagtttccagaatgattgactgggctgctggctgttcagttagtcccactaccatacctaacccagagaagatgctccgttgcaaaagaaaacaaatgtgaaccgggttctgagagtttaccagggagaaaaagctggattccttctctcctttttttcattaatgaaagccaaagtagatgacagctttctttcaaaggtgaaggtataaattacagagagtctctgggtgtgtttacacacataatgattctcagggttaacgttccaaaagaatgacatgggtggagctgtttaaaaagtgtgaatctgagccacattcctaataacccggcactgcaccaatgtggcaggatccctgtgatagcattgatatgcagcactgcaggtaagattctgatatatgtacttcttggacctactcaggctgatattttaaatcttaacaaggtctgtggagcagaacactaaccaaaagacaggaagttaaagcccaaagtccaatgctagatatgtgagtgactgtaaaacaatcagctagtcacttcagtcactcactgaaaccatcacttttataggtgtttttcttcttcttcaaatacttagatatgatgatccttgattatgatcttcagtccatgttttcttcatttaatctttctaataacactattttccactgaccagccaacaccaccgttgtgaccctgaatacattacttaatcttctctactctcaggtacctcatttatgtgaaggaaatattaatcctttgtgtttacttcatgttaaaggcaagttaaaatgatacaaagaacatagaatctataaagtgcagtgcagttataacacctcattcctttcaagctgtatgatatagcttggaacatagaagaccagtggtgtcataaacataccttgaagaaaattcgattcagttgagttcaaaatagagtgagaactgagaaaatggaagcagccaatatagaaatattttaatgaatttttcttgtgtaaaaagtggaggaacaggtcagtcactgaaagacttcattggagcaaagccagagagaggctactggtgtgaattattcatagcatatttatgtgttagcaggagggatcccatagaaacaagattgcagaatagaagtgtgaaattataggaggctgtcttcaagtagaggagaggaggtagaattcagacccgtgggctggaacagtagcaatctatctatctattatagtagagaaaagaacattgcagaggtacagatatgtgggagtggacatattattggtcaagaaggtgcaagtttttttcctattggttgtatttgtccaacaaatcacctaagaaggaaggagatgtgtgttggaggttagagaagaaagactgagagggtgtatttacagaaatgtcaacattgaggttgaaacactaaaggtttaaagtcataggtttcaagtgaggcaattgcagccaattgttcaatcaaatcagatgatggcttcagatgtagaggaatgtttcgggtttctattgccatgataaaaaaaaatcacaaacaaaagcaacttattgaggaaagggtttatatcacttccacttccacacacagtccatcatcaaaggaagcaaaggcaagagctcaaggcaggaacctggagtcagtcatggcctctagtcatgctgtttagtacagcatgaggggaatgctgtttcctggctctctcctgccttattcagcttgttttttttgtacaccccaggaccacctacccaggagtagcaccaccctcaaagaactagatcttcccacatcgatgtcaatcaagaaaatgcctcccacagctttgcctactggtcaatttcatgaaaccattttccaggttgaggttctttcctctcaggggactccagcttggggtgagctgacaaaaaactagctagaaaaatggaccctttgtcaatttgaacacaaatgtatcactattcgactacaacctttcctttctcatttgttccaaagatgtcatatattaatatcacactatattccaaatatttgggtgtgagccagcctttcatgactgagccaaatctccagccgacattccaagttttaaaagtcccaaagtctttaaaaattataacaatttaaaggttcaatctctttcaaacatcctaagttgctttcaaagttcaaagttttgctaaaataaccctagtttctctaaaacattcaaagtctttctaaaatattcgaaatttcttaagtgtgggctcctgtaagattaaaaaaaaattacatactttcttatttcaaaaaaggaaaagccaggacctactcacaatcaaatcaaagcaaaacaaagtccaacaatgttggacatttccctactgcctgatttctctttaaacctatcctggctccctctctgatggtatctcttattttgctctcctctattcttcccctcacaaacttcctgctcccttatgtactcctcacccctcctcttctccacttgtcattctcctagctccttctcccctccccgcatgctcttaattttcttaggagatcttgttccctttcccctttgacaggggaccatgtatgtctccttagaatcatccttgatgcctaacttctctagtggtgtggattgtaggctggtaatcctttgctctatgtgtaaaatccatatatgagtgagtgaataccatgtttgtcgttttgtgacagggttaccttgttcaggatggtttcttctagttccattcattggcctgcaaatttcaagattccattgtttttttctgctgagtagtactccattgagtaaatgtaccacaatttctgtatccagtcttcagttgaggggcatctaggttgcttccaggttctgactagtataaataattctgctatgaccttagttgaacagatgtccttgttgtatgaatgtgcttccttttgggatatgtctaagagtggaattgctggatcttgtggtagactgattcccattttcctgaagaatcaccatactaatttccaaagtggctgtacaagtttgtactcccgccagccgtggaggagtgttcctttttctccacatcctctctagcataaactatcattggtgtttttgattttagccattctgacaggagaaagatggtatctcagagttgttttgatttgtatttccctgatggctaaggatgttgaccactttcttatgtgtctttcagccatttttgattcctctattgagaattctctatttagttctgtaccccactttttaattggattattttgtgttttggaaactagcttcttgtgttctttgtaaattttggagctcagtcccctgtaagatatggggttggtgaatatcttttcccatggctgtcattttgtcttgttgactgtttcctttgccttacagaagcttctaagtttcaggaggtcctatttataaattgttgatttcagtgtctgtgctacaggtgcaatgtccaggaagctgtctcctgtaccaaattgttcaagggtacttcccactttctcttctaagaggttcagtgtggctggattgatgttcagttctttgatccatttggacttaagttttgtgcatcgcgatagacatggatctatctgcagtcatctatatgccagcatccagttatgccagcaacatttgctgaagatgctttctttattacattgcatatctttatctcctttgtcacattcagcaaagtggcaggattcgagattaactaaaaaaaattcagtagccctactatatacagaagataagagggctgagaaagaaatcagagaaacatcaccctttacaatagccacaaacaacataaaatatcttggggcaacactaaccaaacaagtgaaagaacattgagtctttaaagaaagaaattaaagaagatactagaaaatagaaagatctcccatgctcttggataggtaggattaacatagtaaaaatggcaaacttgccaaaagcaatctacagtttcaatgcaatccccatcaaaatactgacacaattcttcacagaccttgaaagaacaatactcaactttacatggagaaacaaaagacccagtatagccaaaacaaccctttacattaaaggaacttctggaggcatcaccatccctgaattcaagctctattatagagctgtactcctgaaaacagcttggtattggcacaaaaacagagaggtagaccaatggaatcaaactgaaaaccctgatattaacccacatacttacaaacagctgatttttgacaaagaagcaaaagatatacagtttttcttaattgcagtttatttttcatcccagtaaaccagagtcacagattcttaacacaaaatatcactcaaatggccttggtagaatttttacttccctttgaaatttcacaagccaggctgccatcatctgccatgctctccattttatcttctagttcccatagtaggtcactaactctgaacactaaatgacttttctaacccaaagttctacagtcctatcaaaaacatggtcaggtctgtcacaggaatatcctgcaaatcagataccaatttctgtctttgataggatttctattgttatgataaaataccataagtgaaacaacttaggagataaggatttatttcatcttatacttgttgtccatcatgaaaaagagtcaggacagaaactcaaggcagggaactagaaacaggaactaaagcagaagacatggaggattgctggttcttagcttgctccttctagcttgttcaatatgttttcatatacattgcaggggcgcctgcccaggtatgactattgtgtacactgagatggactcttcctcatcagtcaccaatcaagaaaatgctacacaggcttgcccataggccagtctgttaagtaaatagtatacgttggtgttttctcttcccatatgactctatattgtgtcaagttgacatataattatgcatcatagaaaagtactaagctggattttccaggatttcttttaaaccagtgtggaataataggtgagtgggtcaaggagatgggggcataatgcatgcaataaagtgatgacaagcatatacaatcttactgtcttagtagggtttctgttgctgtgatgaaacaccatgaccaaagtaacttgtagaggaaagagtttgttttgcttacatttccctaccacagttcatcatcaaaaacagtcaggaaaaggaatccagaggtaggggctgattagaggacatggaaaagtacagcttacaggattgctactcaggacttgctcagcttgctctcttatagaaccaggaccttctgtccaggggtggctctatccacaatgggctttaccctctcccatcaattgctaattaagaaaatcccctacatgcctccctgcatacagcttgccttatgaagaccattttcttaattgaggtgccctcctttcagatgactttaacttatgtcaacttaacacaaaattagccaggtcacctagtaaagacaaccagtatatcaactatcccaataaatataagctgtttctaagtaataaaagaaatgtactggaaatttggcacatagccagagagtacaatatctgaaactgaaagttgggggcattagcatggtgtaaggaatgaccatgtagtaaaataaacatggaatttgagtagagtatgcaagtgagagcctaggatatctagagatgatcctggaactcactatgtagaccagactggctcaaacttagaaatttgcctgcctttgcctgctgcatgctggggttaagctcatgagctaccatgtctgtcatgcatctttttatctttatgttctagaacagttagaacagtggttctaaaccttcttaatattgggaccctttaagtggtgactccaaccataaaatcatttcattactacttcataactgtaattttgctagtgttatgaattataatgtaaatgtctgatatgcaggatatctgatgtgtgacttcccaagggagttatggctcacaggttgagaatcactgttctagaatgttacactgtaagaatggagaaacagttataagttcatgagttattgtcatttttgtgattgaagatagtgatggggatgatagaaaaataaagaagaggctcctggctcatgtttcaaaggcatactcatagggtagtgacagccagggatggtagatccgtggttgccctgatgggatcctgataagtccaaaagacaactccagtccctggagaaatacagatgatttcatacaggacatacagaacaagaacatgcaggtggttttatgtggaaatatgaatttttatttcttgataaaatatcagaagttccataaccaggggccctatttccatgagttactagatgattagagcccaagcttgctgtcccttttgatgggccacgtggtcttcaatatccacagtccctgctatatcttatcttctcttcaaagtagtgatccccattagttttcactccctttacttcagtagttgtgatttctagaagtgaatctaatgaataagtaaatgttttattacattcctctttctctccatctgaccctgttaggcacttgattatagacccctgtcctatatctgactgataaacttctctcaattacaatctgaattattttcccatagaacaaaaattaaagtctcttctatgggatgatcctctgaccttggaatctcaattagacttgatggcactataagaaatgaaactcaaaaatgatcaggcaatataatgttagcttcagaagaaagactttgccagcagtctaggttttagcaagagactactgaacagacacattccctctagccagcctgaaggcaaacaaggctcttgagcaacccaagtcctggtccttttgctgtggtgggtccctcctttacacttgctgccaagattagcactctttgaagacctgcaagaatagcacagcatgaagcagggaccccacctgttttctccaccatagactgatgatctccgttgttcaaaactcagaaaacagtcgcaaagcaaagagaaagtatcaaagatcaaggtctgttttgttgaggtaagctatgtggaccagtcttctagttctggtccaattactccgaaaaactgaaggttcctgatctctttgaaattggagttgttaggaactttcctccataaagcatttcttgagactcagccaaactcagggaatttatgttaaacacccagtaatcattacagaggagaggtggctatttctaggagacctaagtaggaagtcacatgaggttgacttctgggttatagctagagtaatggtgttgcccatagcagaaaatctttgaaacttaaaatgatggcactcttaataatttctttaggacaaaggtgtgaacaggacttctatgcctcataggagataaagtctccattgtgtgtagccactccacaggactctaaaatgtcaccctggcaccagaaggaagagatgggcccttctagcaggattttcagagtgcttttccttaactcaaattacagataggttttgaaaaatactaacaagctagcttttgtttgtttgtttatttatttatttattttatcccggtgaaaagtgtattgggatggacaagtgagcttttcagcagagttatatgccaaaaccatctgcacccctatcttgtcctctccctaccccatctcatcctggcccacacctccctcagttacagcctattcacagcctggcataattacacttagttgctggtttgcctggctgatgtctcatttgtggagggtactaatggtagcatactagctccgggcaccaggggtctggtctgggatggacaattcctcttcatactcctgcagaacccaaacagctctgaagaggaaggagctcagcaaatacttcaatccaaagtatctgaaacgaaattgcctattcaaaagaagagaaaggaccagctcctttctttcttttatttgtggggtacggggacaggagagcttccttctctcctagattttcctacacttctttgttacctatgctttaatcctccaacactgttctcatctcacccaggaagcaacacttctaagtactaatgtgttgcttcaattatttttttaaaagaataaacataaatgttcctcttcctgaagccaccatagttttgcatggctttcttgagagcacacgcaaaaacacttttccttccccctatgctgaaggtggtcttctcccaaagatgcagaggagctgtgatgtgaaggggagatgtggagaaagtaggcttcatagcatttttgcaagctgtctctgcagatagcctctctgctcatcctaactctcctgacattgacaaaccctgtgttccttcaagttggggttttaaaaatcagttttgttccccgcacagcaaaaccccatctcagtgttttgccccacattgtactgtgaatgtcacataatattaaagagcttagaaactttttattggcagtgtccagttttcaggtatttctatttgtggatgtatatcaacaataagaaacaggaatgaagatccgtcagagggctcctgggaaaatgcacgttcattttctttcctgagtgaattgctgctgaaggctgcaggatgactctttttaaatatgctaactctctcccattgtgcctattaaaatcacccagctacttttgtttgtctctctcctctttcttcaatggatagtgaagacacaaaggacaagcaaagccctgacttgcccttcataaatatggcctatatagcatcccttacaacttaaaggtagaccattagtttggtgaggcctgttattgttcattagcacaaagagtgtgtaataaatataatgaaagaccgctggctttactctgtctttgtcatcgaaagcagctccatgaataactatggggatttgtctccaaatgacttatttgcttcctttctaataaataacatgtaattagggtaatatattgtttcctagttatgttgcccatgtagtgagggagaaacaaatgcacaattttagaaatgaaagaatagtagataatttttatattatcccttaacgtatttagactcattatgcataagttaaactgctgggaggtctaagtacaaagcaagagccgaggttctacatttaatgagtttttttattgcgcagggcatgaattactgctctgatactataaaactgcagcaagtgctctgcatctcagatgagattctctgtgaggaatgcactcgtcagtgaactgtcagcaacgggatggactaatctgatttagaaaggattaggttgggaactgtgcctctgaatgtcaaggtagctacatctctacagaggagtggaatgtttaactcttcccatccagggccacaagtgttaagagagcctggtaagacacaggggcacatccattactgagcatcaagacagaaacaaattacactgatggccccaagtccctggagagaaatccatcttcagcctgtgctactagtgaactactgccaactttgccccagagtttagggcatttttctgagggggagaggtgaggggatccagggaagcctctatgaatgtcagagaagaagtaaggacaagcagccactctgttttgtgacccgtaagaaatgtaagtacagtgagcagagctgaaagtgcagatggctggacagggaggagacaaactaggagccatcttagggtatcatggagaaggctagggaggttttggcactacagatgctccaaggtttggggttagttactgttggaaactagattggctataataaaacacaagttgtctcagcatagtgttttaactctaaaccttgtaaaacagaaagccatggaggctgctccttcttagttcttcctcacctctccctagacatactgtcacctagcaggctcttcattcatacatttgttgtgcactaaatatgatattgtttggtaaaaagacttttgggcactctcttcataactttgttgtgaacctcaggacatggtctactgatttgtgggtggcagagggacaagtaacattggtatggtcttgtggtaggtactttgcacctaattttgacccaaattcttcacatatgttgactccgaagcctctctgtagtccctggatgacgtagccacccccattcacagctgggaaaactagccataggaaacattaagctatttgccttctttctgctcttaggaaattcaagataagattttgaactttgtgttatggccagaaagcctttgattttaagttgttctgatgactacctgcaggtaactgtcacctgctttttcagaccaaaattaactgcctgtctaactctattgcttttcacacaagaaaacaaaaggccacaggcatcataccaaacatttaaaattcaaatttgagacaaagagttctaatttctttcctattattcataaatgtagaattataggttaaagacataaagaatgggcatttggagggtaaaaatttggtctcaggtatttcatgtcagtcagaagaatgaatttcaagaagagataatttcagcagagagcagatgaggaattgaggaaagctttccctcaaatcccaagtgtttcctttgtccccgaaatgaacagtcaacagagttgactaggatgggctgaagtaagacgctgaaacaccagccagctttctaagcaagtaaattggaaaacataaaaaggcatgttggaacacctccgttaataatacatgcaggaaaagtaatttctattaattagagtgtacattattaataaagtatttagaactcttaccttaatttaggtgttatgaggaaattaaagtgcttctaatttcaccctaaaggttgatggctgaatatttagaatagcaagcaagaaatggcaagctgctaatatacaacctgaggtaatgggagaggggtggggcttggacgcttatatgagccaccaagtggcgagtagcataggtgcagtttctactatcagtgaacacatatctcagtggtacttccactaactcactctacctaaagtgtaccacaatgttacctccacagtctccccacaatgtcccacatcatcacctccacactctacccctcatctgccacaccatgagtgagctccacaggctatcccagggtccacgttgtgagcgcctcactcagggatgcagctaacatttccctttcccttcagctcttcccttgggcagagctcctattgacagtgtacacttagtgcagaaagagatttaaggggtccctagaatccacaacctctttctcattgatgcctaaagtttctcttcttcattttgtttgcagccatgattttctcctcattcaagtctttccacacgtccttcagatccatcttcctaaggcactaaaatctaacactgaaaactcaaatctctccgatctggcatctgtgggtgacgctttgtacacatactcaagcttacccatgctgctctgcttctctagctctggtcacccttccccagggctccatcaaatgcacttggcctttctaaaggtcatccatgggtcacatccagcttagatatccctgcttttctgggagatgaaactgactttatcgtctgacctgccattgtgcatattgtctcaatggcaggtttttcaattaataatgcatcatcatttattgtaaccatagttactgtcattattcctgtctgtgcaccagggacacattttagtacttggcttatactgttctttaaaatccttatagagcctcatgacaggaatcattgtcccctctgttatacagaaaaggcgactatgacacacacaggtttggtgacttggctgaagtcacaaaagctgttttgagccagactgtaaggcacgagcaaccaatctaagcatgatctcacttctggaaaagtcccttctctgctgattcaaattttgtgttatttggagtgatcacacttcactgtcaagcacttgggacttttgtctagcagaggaaagcacaaacttccgaagtcttcctctgtcgcagtatttgccatcctcggcacttggggagcgagagctactgttatattactgccattctccccattggcatcatgacaggcagctatatttcatcacttttaagcatctccctattcttgcaatcctctcttaaaaatacaattcctcacacgtaccctgaaaaataccaatgttttcccaatgcctttatgcagattcagtgattagatttgatcacagagaaaagaagcagcacagagatgatcagctttgcacaaacaagcagagatgatgtcgtgagcactgaaggcaagccaccacatcccattatccacctgtcactgccccggcctggtggcataacattcttggttagctatacaactgctaatagaaaacattaatgaatggttataaatattaatgggtgatgaatagttgctggcagagccttgcaaggcttcccttctgactgtatttatgcccattgagagccttttgaagatcacagggaccaagggtgaggagtgcatatggagagaataatgttcattagcttattaaaccccggttcctcacagggaggttaggagacagctggccaatttgagccctcatttgcagatagaggcttgttggcctacagtaattccacaatacaccctaagtccaaatgggagaaagtgcagagctaagaatgagcactttctccagaatacctgtcacctgcttgtagttatcacatcctgaggcgccttgggatgtgatggcagggaccaatacaatcaggcttccagggcgaaacaccagcacttcaagcctcctgcaacatttattcctcatgttaataccaagaataaacagttgcatgttttatttttaatagaactgtaacagagatgaggactgtgttctgaagtttttaaagcatgttcataaatatcatcccttttgataaggccttcatggtctcatgggaaagtggaaataaaatcagttcatgctagacttccactgggaagtctagccatttaggaatcccctgaatctcgtcttctgtatttcaaactccagagatggaaagaattctccaggcaactgtgcttttattccttgcctgactctcagcactttgttctgatgaatcatttgtattttcagtgtaatttcaggttgtgtaatttctgtttcccatcacattttcactggatatgagactgaacatggtttgcaaatgtcatttcccggatgaccttgccactagtgtcctttccctccccaccacgcgctagtctagcgtgtctcaagctgtgggtcgtgaaccctctggcaaacctctatccaaaactatttacattatgattcataacactagcaaaattacagctatgaagtagcaacaaaactaactttctactcaggggtcaccacagcatgaagaactggactaatgggtggcagaactaggaaggttgaaaaccactgctctagacataaacagtttccaagagttcttggaatcaccaagcatgcttcttcctacagaccccctgcatctgctgccctgtctggggagctttctccagatggctgtggccttaagcttttactgtcttggtaccacctcatgaaaatatggtgccctaactctccctttcaacacatgatcaatattataaatgaactcacgactgaaaactagaaattctttcaaagaggcactggacttaccatagttccatcttgccccacctctgtgctgtacagtgttcaaagatggagcccctctgcctgtctcctttgctggttctgttggtcctgagtctctcaagaatgtgtcccagctatactagtcattatttacaaaactttgtgggcaatatcgtttcacttttacaaagtggagataaatgataccaccatgggagtgtcactgttaaagctaagtcaacacaccagggtacttacaccaagcctggtgcataatgagtactcagcaaatgcagaaaagctcagcaactccaatgactctttttaattctttcaaaccctgaagccaacttagcttcagccatccttgatgatacaaatcctgaagacaaagcttagaatgaagcctcttagaaggaggtggggaaacacttcccagtcacacaacttcccctgcaacacattgctctgagatgcaaaaaaacaatgaaatgggcttgaagacagctctcaggagaggccagtggaatcttcactggaaagctgaaagttgactgagaatgatcagtagcaaatgatgaagatgagggacatttcccagacgcagaatcagagtatggtagctgagagtgaaagtgaagtatatttcaaactctgaaaacaactcagctggtaacaaggagtcagaaccagtacatctctgatgtacaaggtgagcccaggaaggtgatctaggacagcagctggcagttccgtttaaaaataaaaggacatggggaaaaggagatgaagccattgaatgtactaggcttggtatcaaacagtgttgaaattgccttcctaaaaaatcatcatgagtgcacaaaagggaaagatgggtgtgtcaagagtctgtcaatgtttctgggcatgtccatgtagaatgaaggctacatatcctaccaaatccaccagggaattttcctgtggaatttgagaacagcactttctcctttgtctttcacagcctcaaataatctttctgtccctccacactctgcctccaacaccttatttcctctctttttaaacatggataacttggactggcctcaagctcataatcctcctgcctctgttttaagattagagccctgtgttacgttatctctcaactcctctgttaatccaagccctaaggaaatattcaggaactgatgagaatgaatcaaataatttgtgtttcattccattaagttcggcaaatctcatttatcttggttacgggtggcagcctctagaatgcatctcctgaagtctcttgtatgtatgaaattgatagcaacccatttgcactacgtgttctttaccatctagtcttcaatgctgctgctctcaattattctgtatccataccctagtgtaaaggatgatctgccttctcttaaaatgtccttattttagcctggatgcatagggaacagcctggagttcagccttcctacccaaaggctggacaacagccaaggcttccaagtctgaacctttggaaagcagtgaagaacactcactaggtaggagacatatctgtgcatttgattctcccctgatttaattcatgaccttagacaatacccagcatcctctgaaacagtgatgtagagcagagcgagacaataccagttacctttaagcttaacctaatccatgtttctattaaagcagtctcccagggcttctccccaatcactaacagtaataaaattgttctggtcggagagactgaatcctgtgctcttggccttgtgattccagtgttgacacatcagttcaaatcttggacagaatttcggtcccctcaaagcagttttggtgaaactggctgtgatttataccctaaaacattaaaggtaaatgaactccttcagaattaatgcctatcactaggcctataccatggtggtataacccgtctgttcttgtgtgtccatcccttggtccttgtgcaatacaatttaacaaatacaaaaataaaaatgtgttatctttgaatggcatttttaaatttttacctcaccttccttaactctcttaacaacttttgaattcccaatacaattgtcatttatttttgagacttgaggaaaaaattaggtggtggagaaaacacaggagatttgtgtagaaataaaaggcagaatttcatgttgattgtgtgtttataatcagctccatttttgcaaaagattagcaataaggtgcaaaaaatctgacatctcctaatactattaaatatttctccatttaatattatcataaaagtaatacatatatatgagcagatagcagaactattgaaaattgccatcgaaatgcaagatcaaggttagtggtctagaaaaagaaagaaacaccactatagggtgattaagtgccagaaggaaggggtggaactcttgtcaaattctctgtgttcagagctttctggtcggcaatatccagagttcacaatgcatactgctccagcataattgggatcagagaggtgagtctgtctctgctctaaccttctgctatgggagcgtgtaactggactgcccaggccctccagtccttggggtacagaaatagtcttactttacccagtaattagaatccaattttgttccttcaaacccccattcctgatgggctttgcagttctaataatgaaatctccattacatcccaaagccttttatctcttttgggtgttagagtagtcttattctgtttctttaggattcagacctcttcttaaaagctaagtatcatatttaattaatgccacattctcctccagcaccctgagtgggctgcaaggaagtcttccaggaccaggcagccagaggtaccctctcatgcttccttttcccctcctgagtctaccagcctaccaaaacccttcttggattgatctcatcaagatgtgtccttgcccctggttacctatgcttctctaactctgcctagccagttctttctgctttaaagatctatttctctgttaaccctgagcttcacttgcttattctctgaagggcccttgctgacctctgacttcacaatcccaatgtggtctgtaatgtcagagtgacctagttcttgtgtcttttgccagataatgaaaaggcctaccctatgcagtccattcaataaggaatctatcaatggatttaagtcattgactgggacaacacacttatgatccaaccacttcccaaaagccctacctctgagcactgtattggaatacaagcctctttgggggcacacttcatatctaaaccatagctaatgtaaaatagaaaactctagaaagtagatatctaaagaagtcaagatacctattgttagaggcttgaagcaccttggacagtatgaatattgaagattttctattcaccaacttatttgtaactataacatctttagcatctgtattcccttcattcaagacttccctgacataagaccaaagcaaatgtttatcatcttgtacccattggaatttctgaattacctgtatctgagtagatctccacataaaataagcctccaattataatgtgctttcctttaaaaaataagaaaagcaattaaattaccaaaaactaagagctgggaaagcatttctcccaaaagctggcaccatttaggcccatgaaagggtgcagtgctgtgaggatgctggaagtggagccttcctgtcttctacttctggagtgaggttcgcagaaatcagaaatggaaaagaaatcacttcctttgtttccctcttctttttctccttctagcatctcttattggctgaccctaactagaagccagctggaaaatgaatgtaggaaagatgatatgctgtgaccaaccacagtgttattatacacagcatagaatagcatgcctggagccaagacaccataggttcaaaactatcaggtcaaatgagtgtattcccttgtgtatctaaagcacagagtttctgtggaaagaggagagcatgaaacaaacttatcagatgggggacagaagccaggttcgcatcacagagtcttctgtgctgtatttaaaaaaaatgttaaatctttagttataatagaaaagttgtgagccaaagagtagcacgaccagaccatgtttaaaaatggtaagtgggtggatgtagcatctgagcaaggtgcatcctggcttgaagtttcacagtgtttcattctttttatcagctggaagttctagactagtcacacttggtgatgttgaacagccatcagatgctgtccttacatatgggacaccagagtagatgatgggcaaattattgtcagagcatcccagagaagcccaatcttagtacattaggataaaagaggtggaagaacagagaacagttagctcatcccttgggaagggttctggctatatttctgtgagggggtaaggcatatggtgtcaaggagaactgcaatattaatcttttcataatgtattgctacctccaaatagatgttacccaattaaaaagtcacgtatctccatatctccagaacctcagattttattggaattaacaataaatgactcaaaaatatcaagtcatttatttcttgtacctgctattaaacatttaaaacatgttctttacaaggaaacacatacaagtactacttgaattgatgagccaactttgcaaaaatgatacgtatttgttttaaagggaatagctctatctatacaattattttcttcgagggagaagtataaatatgtttattcttttttgccacatacacacaaaaaaaaatgtactgtgactctttcagctccagtcactgtgtggctggagtcagtggagttgcttctgcctttaaatatgacagtttccactagagaaatggatggataaaagaagaaaatatatgataataaaaatctacaaggctaaagtgcatttttctggaaggggacttcttttatgtcaatttactgcttacccataccatgtttgtctttgggaacaccctagttaatcaaggcaattgcattctcatggcagtcactgatgcagtggaatgtgagacattgcccctttataagctggagtgcagatccttaggatccaaaggggaagattgcacaacttaccagaaggtatgaagcatgcatcatgtgacccagctgtccctttagggtcaggaacctggagagtgttggccctgagactatgaaggtcagagcctgatagacatcaacactaatgcatggaaccggaaggaggtgtctcctactgtgtttggttgtcttacattaccctgaaggacagagaactgagtgaaaccatagttgatgacaactgtagagggtcctgaatgcatagcaggaaaagcattaaaacagcccgatggttttattatatatgtgtgttaatcttgcctctggatgagaaataagagcaggagtcactgctttggggttatagctactcttcagtgagaaaatggcacgcaaattctgtttgcccatcagaagttcctgttcaggctatcacagtagaaatggagaatgagaaatgtacgataaattgcactggaagacgccctgccaggcacattaactgctgctgtgtgttaatgccttagagtgattacactggtctcctttcttcagcattgttttttgggagaataactttaagaaattaaacttaatccttgattacatcaggcgaaatggtctctttgattaagtgtgggttaatttgtacagaattaaagcatccacctcattcctgaaatactaagatgttatatagccacaggcctgctaggcagacctttgctaggcagaccacacgccagtattcagtttaccaggttaccaaattgccaagttgctgctgagtggctactaaattccaggaacttgtcaaaaggtataagaaatatgaggttcaatgtgcttttattcctgtccttaagtaaaatttctttgaaaacagtcaatgatgaggtaatggagagcttcagctcaaggatccaaaattctggcctttcatcccatgtgtacactagccatcagtgtgagtctgggagtgccaccaagctcagtcagtatcttcttctaagcagcagccacggaccacattttctgcttcctagggtaaatgtaggactataagtgaaaggttttctgtcccaccttgtcctgcagtcacttgtaaataatcattcagaggcttaatattaattacagaatgttgggccaatggttcaggtttattaataattagctcttatatttaaattaacccatttctattcatctatttctctgacatcttgtgccttggtagctgcacttctttttccctgtattcagtttggctcgcctacctagctatattctgccttgctataggccaaagcagcttctttattaaccaatgagaacaacatatgttcacagcatacagaagatttatcccacaggactaatggaaggcacacatatctctactcaagagcagtgtgcggtcagcatctcacaaatgtttactttttgttggctgttaatacggtggtttaaagctcacaagagcacaagagaggcagtctgcagttccatgggaaagggctgaagaaaggaggtgtaatggttgagctatttgaaaatataagacttgcctgacagatgtgatgatctgaagggcctggatatgtcagtgcaacttaactgatccaatcaagtagttctattccttgcttcgagcataaaaagcagaagtcaaaaaccaaaggaaaaaaaaaatgaactttccacatctaatatagaaatagcgtttcacaaaaggggaaatgagtatcccaagactcagattctatccccaaactccacttaatgaacaatgacaatgacaaccagggctgcttgaggcttaacaggcatagactaagtatgtggaaatttagagccttctaaaaggagctaatggtcagaagcattatctttctgtaatatctgagagttgtcaaattaccaaatcggggtataattcattctatatttatgtaaagctatgatggtaagaaaatttcgaatcaaaacacacagcattcaatttattcgagaaatatttcctgagtagctattatgtaccacgaaccatgccaagccttgtgaatatgaaacaaaatagacattaatccacaacctggaattttcattttagaaggaaaagtttattatttgacttagtactagctcaatggtgactgcttggtgcagccaagttccattatactttataaagacccaagggagaagatggaaacctttctaaccacacataaaagcaaagaaagaaattgatcaaagaaataactgacatatttaataatacacgaataaaaactcggtattgggccatgaaaaaagatactaaaatgtagcatagtacagatagattttttttcactttttcagatgagatacactttcagctacagtcgaatgacaaaaagcaccaaaagcttcacaaatattacatgaaaaagatctacctcactagcaatcaaatcaatgcaaattaaaatgaaatactgcttttgtctatcaaattagttaaagcacataaaggatagtcccctgtgcagagaaggatgtggtggcaaggatgttttcatatatttccggccagcagcaaactgtactaaccttcctggaaaggaatgtggcaatgtgatgccctcagtggagactctttgctgctgagaatattactgtgaaagtttatccccaagaacttgttgagaaatttgtacagtgacctgtataccaacaatccccaaatacttaatagaaaagcttccaagccaacagcattaacatcccaatgagaagaaaattaaataaattctcataactctaatcctacagtgcaatattatttaaaacagctcaactattatatctgcttgcaaactgataatgatagtgattttaggggagatcataatataatatttcagagcagaaaaaatatttaaaatttaagtcaaggaaaatgtttttattatttagacaaaactctatagataacataatttaagacacattttattaattaataagaagcttaaaaggattatttttatgaatcaaaaccaaacattttcaagcaatataaatggacaatttagttgtttatcattattattattattattattattattattattattattagtgtgtcaatgtgtgtgtgtgtgcgtgtgtgtgtgtgcgtgtgtgtgtgtgtgtgtgtgtgtgtgagagagagggggggcagggacagacaggcgtgtgtagatacacattgctacagcacatgatgaaggagtcaattaaggcattatttttatgtctttctactgtgggttcaaagagttaaactcatgtcatgaggcttgtatagcaagtgaccttacccactgaatcattctaacggctctatgtatgttattattattaagaaggtagtgtttgagatattggatatcaaatactgaggagttaattgtataaaatatatgtacaagtttaagaaaaaaattataaaatatacaatcaatgcattaagtaggacctaaatgaaagaagcaatataacttgtttgtacatagtaagatttcctattgtggagataccagcgtttcccaaattaattcatgacttcagtgaaatttgcacagaaatttcaacaagcatcgaatcagctgtgtatgtaaaaacaaatgcagacgaataacaaggcattcttgaagtagaatctggtgtatatagaatcttcatggtctttgggtaagtgttgtctaaatgactccacatctgtatctcattccttaaaggtaagaagagcaaaacatgagtagaaaaactttgaatatgttagaaaaagttaaaaatgagaatattttaaaaatattatacaccagtctattactggaaaatctttttacattttgtacactgagatgtcacttggcagttagaaggactgtatttctaataaatgcaacagcacatttattaaatctacatgctaagtggaagaagcctgattccaaagactgtgaaactgtgagatctgtccatgtggttttggaaatgagaagctatagaaaagtaacatgaggagaaataaaaagctaggtgtgggaagaaggtctgatcatgaagtagtatcagggacattttgtggtaaagaattgttccaagtgttgatcaggatggtgtttacataaatgtagtgatttgccagaactcacagtgcacatataccaagaggactgaaccatgtttcatagatattatgcctccaccagttgactttttaaaagggggggggtacaagaaattccctgggaggcattgtacccttccaccatccataattaagtttgagaaaaaccacctattctacccactctcttcatggggtaacttcaacatttttattaaatctctgaaaatttcatacaatgtattttgatcatatttttcacccttcccaaactcatccctaacccccaactttgtgtcctgatcattttaaaattcatttagttaatgtgtgctacctatgtgctttagggcatatgaaaacccactggagcatgttccatataccaaggccacacactcaaactggcttttcctctccagtagttatcaattgccaatagcttctaaactagaactacctttcctctccaagctgggatttgtctgacttaatctagggcaagttttgtgcattctgtcacaactgctgtgttttcctatgtggaacttccctgttatgttcagaaaacactctttccttgtagttttccactactactagctctgacaattttcctgctccttttccaaaataatccctgagccagggagtatgatagagatatcccatttagatctgagcattatttcctagtctcttctatctctgtactttgaccagctgtgggtccctctgttaatcactgtctgttgaaaaagaccaagcttcttgatgaagattgagataatgtatgggtataagccattaggagttgatttactactatgttcatttagcagaataacagtagtagtttctcccctaggcctgtgatctctctagacataggtacttggtacttggctctaatgatggtgtcaagtataagtttcaccttatggatcagtcccaaaagtcaaccagaaagtagttgattatctccatgcaaccactgttgcactagtagacatatctttctaggccagtctttcattacagtagctgataaagtaattgaactcaggttgtcaggcttggtgatacatgcctttaccctctgagctatcttgctatcctgggaagagcatcatatcatccagtagaagaaaagttccatgaccagacatcaaaatataagccaaaggaggggaaaaataatattctatatatgttaaaattttaaaactaccatttaccaatagacactacttttaaaaagacatttttaaggatacaaccttggggtagatgctttacaaagatgctttgaaagttaatttctaggacttattataaaagttttaaattgtgtcagaaaaagaaaaaaatcccagtaaaaaacaaaatggctaaaatgtcaagtgtggtagtttgaataaaaatggtccccatagtccattatgagattgtactcttaggagtggccttgttggagtagatatatttatgtattggagcaagtgtgtcactgggggcgggctttgaggtctcagatgctctagccaggcccagggtctcattcttttcctgctgcctgctgatctggatgtagaagtctcagctacttctgcagcaccaggcctacctgaatgccaccaggcttcctgccatgacgataatggattaaacttctaaactgtaagctagccccaattaaatatttccttataaaagtttccatattcatggtgtcttcttcacagcaatacaaaccctgactaggacagtatcaaaatataattcaaacactaggctataggaatagctgccaatatataaaaagatggccagactcagaagcagtcttgtaaattagtgaaatagcattttacagttatcccagctttgccaaaatgtgaaaaactggtaatatctgattttggcagttattgggcacaataacaactaaacccaatgttgtcaatgagaatgcaagctgtggtataaatcaatagaagaattaagattttaaaggactagaatttttgaataggagtgtatatgataggggccacagaaaatcatgagtggaaggagagaaacctatagaattttttctcttttgcctctagcttgcattgctttacacaatatctccatctacatggctacgaatagcaggatttccttattgtccaagattgaatagtattattttatatattccacattttctttatttatccacttgtaaatggacacccaggctgatacaatatcttggctattttcaagtatgttacaagtaaaatgggagcatggtatctaatcaaaacactgatttccatgtttttgcttaagcaaacagaaatataagtgcttgtaagtcactttcacaaatatgtgctataaaactaaatatgttacagtgtacatctctgagaggcattaaatatttttaatatagaccaattattttataaacctatttgtacttttttttttggtttttcgagacagggtttctatgtgtagctttggagcctatcctgtcactggctctggagaccaggttggcctcaaactcacatagaaccgcctagctccgcctcctgagtgctgggattaaaggcatacaccaccaacacctggctatttgtactttttttaatttcaatgtatctatatctcctgcactggtggtgcaaataaactgttgtcttttcaaaattatggttcatattctattgttactgcttcaaaatttgaagcattaaaactgaaaataattataattaaaatttgcaataccaagcatttccacaaagagtacatcagaagtatacttaaaaatcatccaaattaataatcaactggtagaaatgtcagtgagaataacaacaagaatattaggatgtgcatttcaatttctttaaaaaatgcccaagtgcttgtgaaaatacaaaaatatatttaaactcatcaggaagcagaagattgtgaattaaaagtactgttcattacttttcaatagtatcaaatcttaatgggcatgaatatatagttatttcatgataatttagttgataaaaattaactagttaatatcagcttctgattagagtagcattatagaaatataccatttgccactgatagaattatatgctgtcttagttccttgaaaacaaactcacaaatgcctgctttagtgttgtttgttctatgtattgtaatttcttaatattatctgaagaaattgtcttataaatgggggaaatgagatttataaagcagatcctaatatcagcaataatagtggcaaaataaatattatatactctaaacataaatcatattaaattatcctacatgtattctgtattttactgtaaaagaactgaaaataaatgatttgattctgtgtgctggaaagtaatgttttctatgatgtataaatagaggaaaatattttaaaatttggttattaccatatactttagctattataacatttaatgatagtttatctgggtatagattcttagaggaattttctttctattctattaaatctagagttttgattcctattattaaggtgaaatcatctataaaactattgttcataaatctttcatctatgttaattatagatgccaatgctttttatggtattatatctaggtatagacccatcattatttagttaacattgagtataaattttctcagaacttagttttgctttgatacttaaaacttcagccatttcttcatattaccccactcctagtcttcattgccagatctcccatcagaaatatgatggaggagctgcagagatttctcagcaggtaaggtgcttgtcaagcaaacatgatgtcctgaatttggattcctgacaatcatgtaaaaagatgcttatggtactagtgcctgtgaccctagagatgagagagagagagagagagagagagagagagagagagagagagagagagagatcttgagctcactaggcagttagtgtggccaattgatgagctcaagattcacggagaggcccagtctcaaaaaacaaaaaacaaaatatagagaaatagaagacacccaatatacacatatactgccctcccctgcacacacagccttttaaattccctttagcatatttttccttttctgtttctcaagtttattctgattatttcttcataattatatagcatcctattagttttctgtttggtttgaactctgttgttaattctaatgctcttttttcatgtaaatgattgtgtttttgtaatctttatatgtatatatataaaatcatttgttttcattgatacttggaatttttattatagtaaaaataaataacattaaatttactatttttttaagacaggccctggctgtcctgaaactcaccctttggaccatgctgacctcaaactcaagagattttcctgcttctgcctcctgagtgctggaattaaaggcatgggccaccaccacccagtttattttagtcatttttaagttttcactcttctgcttgtttctttttatctacggatctcttccattttagtgtggaaacgtgtttgtttctgttgccatctgtgctgtaggtatcatgtctaagacatcatcaccatgttaaatgcagtgagatcaccattgtttcttttaggtattgcatcttggttttaatacattttaggttcatttttatctgtgctgtgccatttggccttaccgagttctttactgtgtagaggcacagttttcctagtgctatttgttgaagaaactggcctttctcaattgttcaagcttacaacctatcagggtttctattgttgtgaagagataccatggttatggcaactctcataaagagaaacacttaattgtagtagcttgcttacaattcagaggtttattccattatcttcatggagggacacaaggaagcatgaagacagacatggtgctagagaaagcgctgagagtacatcttgactcacagacagcaggaaattgtctgtctcactgggcatggcttatgatttctagctgaggatgccattttttttacctcaatgtaatgtacagatccatctggattccctggaggtttaaactgtgtcctccccatctgtgtacaatccatgacctcatagtttcaagcctgggctcctgtaagtttctgttacattctctcctgcaaatttcttacatgtactttaagcgctatttcatggtatttaggataagatacaatagtattattaattcttttaaaatttcatacaatgtatgaaattttatcatatttacccctcactcttcctgataactcctacaaacctcaactttaataacttaccaaatataatttgtgttgcccgtgtggaactatccactcatatccgtgtggacctatcagggctcacccccccttaaagacaatggactctccctacccccaaagtcattttctgtccctatctcctcagttagaggttgagacttgtgagccactgcccagtccatactggaatgttaactgtcttaatctagtgcatgtcttcttcagggaatcaggcctgcggtgagtttatgactgcagtggccctgccctatccagaagacagttttgctccagtgctccctgacccacagtttatacatctttctgtcccttcttcttcaatcatccctgagccagtgcggttatatggatgtaccagttgtggctgagcactccactgatatcattttctgcactttgacctgtttctactttaagccctacctatcactcacaaggaagttgtcttgtgatgtctgagagttgcactaacctatgggtagagggacatggatttagagggcagttttgatactatgttcatttaacagcataatagtagtagatttacccctgaggcctttgagctcccaaacatatgttcttggccaaattttctgtaccatgaatgtgttttctcctgtaggctggaccttaaatccaaccagacagcagtttgctacatccttgacattcatgctgctattatacccaatgggatatgttgccattgttgcaattgtggctcataggcttcataactgggcaagacttttatttcccgaccccatccccagtaacctgaatatcacctatcagagctagccagaagagaaaattttctggttagtaacaacttgatttttcctgtgtctcatgaccagtgtttgtggtatcttcagcaattgagtctaatcactgagttctggtgagcaaccaagaacagtgacaatagcctgaattgttttagggaagctgtctgtacctatgacaaaccacattaggggaggagggccacatctagctctaggctttttatttggcaagctgtggcttctgggagaagcattatcccctaagtggagcaacttcaatgagaccttatatttagcaagcttataaaatcttagatttcactgtaatctaggcttttccaaataacctaagtgagttattgctgcctccaccccctcctctgccttaccctttcatccttctccccaatattccccctttctcttttatattcatggcttatttttaatgtggcattcatgagcatttaactaatatggagactcacaatggctttccataagaaatttaaaagaattttcctactgaggatcaaaatatattacactatactatgagagtgtagatagattagaaaccctgagacatctgtgccagtttagcttgtgaggatggctaaacagtatgatgtgtacaagagagaataatacaactacatgtaacaccaactgaaacagtgatcagtattactaagcatagcacaataaacatggaattggtcagaattctgtgctggccccaatgaaaaaccaatggatgcatttgtcatgactaaactgaactcttgaagcagtaaccaaacaaaagaaccaagtaactgtttctgaataatgtttatttttgagttagcatggaaatttgagaatcatagatagatagatagatagatagatagatagatagatagatagatattgctcaaaaggcattattttgttatacatgaagagtatgtaaactctagaagtatcttcttagactcatttcatacattgctaattctgtttactcaccaatggcaaatgtaacacgaaaaataaaagtcccagagactgatactggggtccaagttacaagctgaagataggaaaagcaaagcagccaagccagtagatcttacctctactaagctgaaatggcaatcatgtctccaacaatcctcaggggcaaaaagctctcagttcttgtctccttctgccttttattcctttcttcatccagccatatcactcctgtctccaccacctattgctgggattaaaggtgtgtgatcccaggtgctgagatcacctttgtgtgagttgtttcttttaggactgggtcaatttcatgtagacagtgtggccttgactaacagagatccagccaccagtaaatcctgagttctggaattaaaggtgtgtaccaaacactgctcagcttctatagctaactagtatggctcctggaattaaaggtgtgtatcaccattgcctgacctccctatagcttgtggctaacttcgctttctgtaccctcaggcaaactttgataaatcataaataatatatcaccacaggccaccaatggtataaccagtcccaaatacttcaatgggattacaaatcttggctaaaatcttgaaaaatctaattaagaattactttgagggctgaagagaggtgctcatctgttccacatgcttgccgctattataaaggactggagttttgtttccagcacccacttccaatggctcacagccgcctctgactccagatccagaggacctgttgccctcttctgtcctctgtaggcagttgcatacacacacacacaacacacacacacacacacacacacacacacacacacacacacacagggcggggggggagcaaaataaataagataaatctttttttaaaaaccacttttatccttgaaatataaaagtaatagttaattagtattaatttgaatatcacttataaatattgcctatagcagatgctacatttttggtattttcttaacatcaaaaactgtattatattaaattcacatcaaagatttgttcctaattttatccaaattcaatgtcttccctagctttctgacactgagtttgaaagatgcacatcatattatcttctcagattattagtctatgaggcatccaacctgtattaagtagccctaagccttctttctactttcctcccaaatattcgatagtgtcccaccattttcaacaaattcaaatgctgctgaagatcctgcgcctgaggaggggatggtgtggtacaggtgttgcagtatgacaacaacacattgaactaagtccagatggatacaacaaaattatttttttctatattcttcaccattcaccaaagcaggcattcacattgggaatgataccccacaaaaaaatttaggaaaagtagggagtaattacaaagatttgaatgcatcccctgctgagacagcctctccaatttacctgcattctccatctcctgtgtttttctcatccaaattctccatattacctgtagtgttcctcatctcagccatattctccatctcacccatgttctctcactatcttctccctccttactacagttgcccacactacttcttgcctgaattaagaagaaataacacttcctgttgtccttgtgataatttgatttcgatgtgtatactggaatgatatggttgagaatctaaactggagaacattgacttcaaatttagctttaccagagattcaggctccagattcagggagtgacttcatcttgaggaggaccacagtttcagggttgactctttgcttgtcaattcagtatgaggatttctcagctctcttttatgaagcatagattctgtgtaagttaggcaaatgagaacaaaaagactctttgattcaataaggaaagtagggaaggcagaataagcaacatatactcactgaaggtgaagcatgtatcaatctcctgttttagtgtgggcccacccattgtatgaaaaaatgctgatgcttctgaggaatggctgagtgggatcatgttttactgcttatttctataaataccttcaccattgatttttttcctacttttcctatgtcttttttgtctgtcttcattctagcaattgattcatggtatggttaatataactctctgaggtaataggtatattgacaaatgctttccatagttgcagggatacagattgacttcaacttctcttagtccgttgtgttattattaattaaataagaacagtattatagtattcaaagttcacatcttcatatttcaaaatgaaaaaatgtgaaatctctgtctaatcaaattaatcagaagaggtttatgataaaaataatgaggctattgtgattcaacccagaattaagaaaattgactataaaagttcatagcagagaaatcatgtgttatcttttgttggcccagtgtggttggttccacttgaagttttgagaagatctcttttaataatagcttagttctttaaccaaaacctgagacacagcctaagatcatctacttactgttgtcacattgtagtgactgtcttgcacattttcaccaatgacagaatcattagaatggcatcttttgctagaaaaataacttatcaaagttgttctgaaacagtcaatttacctttagcttcaatgccagagctgcagtagcaatgcccttttaggtaggaaatgccatggcatttggtctagtcatagagacatcgaatgtgaattcatttcaaagaagaaatgattaaatacttcctttagaagaaagagtagaattgaattactgctccccaaaatgaaattgtgatcgatgaactaattagactctgagatttcctcaaggagagatgagggaagggatgaaaaattcacatacactactcaaaagaataactaagtactcactgcaaacgagctgagggagtgagtaatgttcagatgaataatttgacaatataaactgtcattggagggtctgtcattaaatcgtcattagaacagcctcttgctattgagcaagaattttatgaagagaataaatattgccaatcacattgagaaatggaattatcctttgtaagtctcaagacacagtctccagagaggcttattataatactatttttagaaaaagaggccaacaaaaacccactagcttctataccagccatcagataaaaagaagtgaaaagctacagaccaaagtcctgtgtatggaatagagagatcctttgaactcaacagttagtgagaaaaaatttctggttttcaacaactggttttgagcattgtttaaacagctattcaaaccataattaactagctatattatttattaaaatagaagtcttcctaaaaatgattcatttttccaaggacaatataaactaaaactaaataattaccagttataccgactggaagaaacaaagaagtgaaagaaaatgtaaaagtttggtcaatagtttcaaccttctcaaccaagcattatccttgacaaagataaaaaaaatagcagacactatgatttttgttttcatttctactaacaacattcgtctttatacaaaattaagtttcagaatcaacaaatcacctactgttttcagttcctgagactcagtcataacaactatgaaaagatagaagttccaaattgccaacaacacacacacacacacacacacacacacacacacacacacacacacacacacacagagagcagtgagaagcttcacaaaataataaaattacccactaattaccccaacaatttgccagtcaggaaatgacatctacttcagcaaatgtccaattcccaaacaaaatcatcatggaagtttctgttttcttccatcttctgatcttcatctccaatctgccagcaagtccttatgttctgcattggtcttccttcttccatttccaaggccttgttgatacactacagtcagttgttgtccaccagccatgctctgaacagagtggtcacctccttggcttggcagctctggggtataataagccacacttgattttaactctctaactcagcctacaggagtgatctggcccattcccatcttgctgtttaccctcacactctgtcccctccatttattcttcaacttgctctctaagactgcttgtctccttactaactctaaaagacttgagctttaatggcccctctccctctccttgtccccccacctctggcttttccatctgtttacaaactatttccttctaatttgaagttatttcaaatctcacctctcaaggaaaagttcctatgactattctccccaaaagcacactggattatatcccagcccagacttttatcaagcttctgcttctctgttcactaagctaataccactgctatgatattactactagaatagtagcattataggtggtgtgtccaataaaaaccctagcaacaagagtaggctacaatgataggcaagggtaaagggtgtggattacaggcaaggcatctttggagagaagcctctattgaggggagtgaggaccatagaaacatccagagaaggacaaactctttggcagcattgtgtgttcaagcaaaaaaaaaagacaaatgtgctgtctctggtatctgacttactgccaacctcagagcctggcacaggctcctccctcctcagcaatatttactatattcaataaatatgtgttcaatgagtagatttgaaaagcattcccttgtggtgttgtgaaagaataagcatttgagatgtggctgttagtgtataaaactttttaaaatgtagatgcaaagatttagtacaaaggacacagaggagcaattgttttaaaagggagaaaatgatgcctagtatggtattgatccaccctcatagaacatggcagcaataacagtgaaggtgagtagactgggcactactggaaaatcctcaagacagacagaactggcataccaagtcaaccagcatagagttaaataagaatttgtagttgttataaaaagtcacaagtcaccgggcgttggtggcgacgcctttaatcccagcacttgggaggcagaggcaggtggatctctgtgagttcgaggccagcctggtctccagagcgagtgccaggatgggctccaaagctacacagagaaaccctgtcttgaaaaaaacaaaaaaacaaacaaacaaaaaaataaagtcacgagtcacactgataacattttctataagaactgtaagattgctagatcaaccagcaaaatgaccttttgtgagttgattactgtccttcaatataattagtctcctatgtaatggactgagtgagtataagggtgacaggaaaaggccattgctctgtgtgggataattcaagtggtcattatcagcaatgcatttctcaatggagagtgctttccttcacagttgtcttagtcactgtctttgctgtgaagagacaccatgaccaagacaactctttctttttttattttagaggcactcatatttacttgggtgctttttgcagtatcagaggtttagttctttatcatcttggtgggaagcatggcagcacacagggcactggagcagtagttgagagctacatacaggtctgtaggcaggttgggtgagggaggagactgaacctggtatatggacttttgaagcctcagaacccaccctcagtgagacacttccaacaagaccacatctactccagttaaggctaaatctcctcctaatccttctcaaatagtgacactccctgatgattatgcattcagatatgagccaatgggggtcattgttattcaaaacaccacagtagtacatttcagattttaaatctcacattgccacataatttcatcaatcagtttttaaagctatgaagcatctctacaccagggcactaggtttctactaccctgttagaactaaatgccacccaaacaactattcagttacttttcaacagtaacattcatattttcttattgcttctctcccagagtccaccctctgaggtttcagtttttgctaaaatcctgcctggtgcagtggatggatgcaagatagttctcattaaggacaccatattttctgagtttttaaagagaggatccaagtcctctttctcatttattcatagcactttgattactaccaatgtggacctttgatgggggaatgtccttctgtatatgtttctcttattggttgatgaataaaacactgattgacccatagccaggcaagtagcataggtggggttatgaaacaaggagaattctggggagaggaaggcagagagaagccaccagggagatgccatgtaacggccaaaaggagtaatatgctgaagtgttacaagttaagccacagcctcatggcgatacacagtttaatagaaatggattaataattaagagagagttagccagtaagaagcctgagccattggccaaacagtttctaattaataaaagtctctgtgtttatttgagactgaagggctgcagaactaggtggaaaaaattctgcccacaggccttacatacaaaattcctattgattcattactgggattcaatagcatcagccattggaagtgcctactaagtcattccttttatcttttgaaaacaatacaggcaataatctgaattagcagtgttgtggtttctacagcctgcccctatgtcatgtcacatccctaccaaaggtgatgtagaaaggaaaaactttctacccaaatgaaaaaatgaacaactgtgtcaaagaatcatactcgcccaaacatatcttaaattttctaactcatgtgttttccatcttcaattaaacatatccgattacatgtcacatgtttgacaaatttttttaactagagttaaacactaagtcataaaaatgcaccatatttccaatattactatggaaaaattccagtatttcttagaatcttgacttctcattacttagtaccttctgaagtctatagatgagctcttcctctgtcccaccagccaaataatgacacagagacttaattatgaaagctcagcctttagcttatgcttgcccccactagttctaataacttaatttaaactgtttctatttatctacattttgcctcagggctttctactctttttcatttgtatgcctgcattttctgtttcctccatgtctgtctagctggctagcccctagcatctccttggcatctcattttctttcttcttctctcaagtctaagttcctccctctacataatctcactgcctggaaatcctgattatacctcctccttcactagtggtcattcagctttttattagaccaatcagatgccttgggcaggtaagataacacaacaacacatctttacataatgaaacaaatacaacatatctttacatagttaaacaagtgcaacatatctttgcatagttaaacaaatattccacaacatttcccccttttgtctaaataaaaaaagttttagttttaatatagtaacactatgtacaataagaacaattatcaggtaagaattgcattcatgatattcagtccatttgcatttggcaatttcagagaaaatgctccattatatatcctatcttggtgaatccaaagttgtgtacctaatttactttctatcctaacttgtattaccagcccaaaattatcttggtcttgtttttgtttttgctttttcaagacagagtttctctgtgaaacaggcctggctatcctagaactcactctgtaaaccaggctggcctcaaactcacagtgattcccctgcctctgtcccaagtgctggaattaaaggcttgtaccaccacttctcacctctctctctctctctctctctctctctctctctctctcttaaaaatatgtatcccaggctggccttgaacttatgatcctcctgcttctgcctccttcagcaaatcctgctggcccaaaattgtctttttagacttcagaacattttcttagataaacaacttaagcttttatgtttctcaaccttataaactttttatctcttatgtaagtttcttttttgaacttggtaacaaggaaaactataactatctcattttaactctatcagaggcccaagaaggttataatattacctgagtgaacaggatgtgcagagcaaacaatgttcaaaactataaaaattaaagaaatagctggctgcctggacagccaagtttcctctgtaacattgcaaaatccgtcttcagcctaaaagcctagactatctgacagacttttatgtgaagcaggaattttaaaagactctcttactttgtcttggcaaaatttcgcagtctttttcctttgtgtcctgattgtccagtttgtacagtaaacagtcagcagttgagacaagggcagtttcttggcccaaatggctagctttgccacagtgaaagaaaactctatatgggagttcttcaatgcccaccattcttttatgaagtatattggtgattccaggagcagacatgtctcattgtcatgaaaagtcttaggttattaaacatcttaaatgtcatattctgtaggtctctgatgcatttgaagatcacctgtctttctaaaatgtatctgtttaacctgaaaatatgcctaacatgactataagtttgttatagacgactaactactaacctgcattccttaattattttaaacaatttgtaataatatgtttcaaggactagaactttctattgcatttttaaatgagatgcatagttacaataccttaaacaagagtagaaacatatatagagcataacaaaaatagtcttaaatttgtatcaagtatacaaaaatctgtactaatataaaatatttgagatgaatagttgtctttttatcctatatttgtatatccccactaaatggtggcaaaatccacaacccactgaataacaaaaagccacccactgcacctcttgagaatgttttctctagactgtttcctgttgtctggggacaacagcatccccaggggaccctaagaaaattgagataatggttaagtcctaagaaaactagatataacatctgttgtctagtctctgtgttatgagaaagtgcaaggcttatctgaagttctgattagaatagtctgtaaggatggaccatttcagctagcagtcttaaagttgttctgaacacaggaccctgaggaaaatacagtagaggcactctgaaagactggatggcctgggccatccattttcattggtgtctggtccctttgctctgaaaacacacaaactttcaaagttaacatacatatctgcatttacacaaatatggactgtgtataatatacacaagccaggcacagatatttttgggggccttttgtattttttttgttttcttgttgtttattaggtttatttttttatgtctgcagccaagatttcaggggttttcctccaataaaatctgctctctattaattttgaaggaatccacagcctttcatttcctgtggaaacaaaagcatgaactctcccgcaatgcaatatattttctgactttcattttaaagttaaaacattcctaaagtatctaggctggtttaactcaacaatgccttttataatcccatgtctcttctcaactgctgttcactcatcagcattcaatattgtaatgttccattttttatctggagactccagagattactgttaggaaaatttattgttcactgtggaaaacttagacattactaatatcaaaatggaaaatttaaatttttatagatatgcatccaaagaaaggtaccaataaagtaaaaaataagtatggggagaaatagaattttggtgagaaaatagttgtgacaaccatagtccctagattttggttctgtcccgtaccaggtggccgttctgatatgagacagaaactctgaatttttcttttaacaagacacttgtatttagagaaggagagagccatgctccaactccaaagctggctttgatttttaagtgagttgggactaccactatactgagaagtaaagagatacagatgtttaggtagtgagatttttttacccaacaaagaatattgataccataaggcagcttttctttaagtcagtctgtgtggggcagtttgtcccagtaagggcatttgggttctggtcatgtgggtaccagataaagtgggtggtattgtgagagttacaaagtgtctttattatggggaaatgtgattcaaaggggaacagactcacagaataccagacaaggtagaagtttccatccccccccaccccagggagatgtgaacaaccccatatgctttcttctgttccaaactcccaggagagcaagcatgctcctactctctgcttatcagtccacatgcagcacctcagaccatgccctaagggccagtaccccaaaagctattggctgaatcaatttctacaacattgctcctccctcttggccatatttctccttctatttatactctctgtctgccagccctgactatcctttctcctgcctcactattggccgttcagctctttattattccatcagttgttttagacatgcaatgaatcatagttttacagaattaagcaaatgcagcatacaagaatataacacatcttggcatcattaaaacaaatgttctacagcataaacaaatgtaacacaccttaaaaagtttttccacagcactttatggaaattcaggccctagcttggatgacaaatgtatgtagctaagctctttctctgtcctgccagccagcttccaaataatgacatgggtacttattaactatgaaactctgacttagcttacacttgtcccactagctcttgtaacttaaactgtttttattcatctacattttgccttggggctttttgtttttctttcattttgtatgtcctgctttcctcctttctctgcctgtctgtctgtctggcctctggcatatccctggtatttcttttccttcctgttgatcctaaattcctcctcctacttactctcactgaccagaagtgatgactatacctgctaccttgctattggctcttcagcttttattaataccatcaggtgccttaggcaggtaagggaaaacagtaacctaattaaagaaatacaacacatttttacatagttaaacaaataccatacaaatctttgcatagttaaacaaaaattccacaacagaagtcatctcatgataaacatgattttttttaaaaaaattagttttgaacagagttttgtgtataactgacctgatccttagttatacactttagggtaaatgtcccttatctggtcaataaagcagtaactgaaacactaaatgatgcacaactgagtagagctaaaactcaaatgtggtatctctggatgtggtgtcacataactatgtacatttaggataatcagcctctttatttacccagtctactagaattgcctattttcatagacctacaacattctaaattttcattctatacatgaggcttttactgtaaaagaaattaaaggacatgctcacaagcatgctactttgatgttttatgttgttttgtttcagaaatacatggtttataaagtttgtgtgtgcctttataatctactttccaggaaacgactatgacatttctgttggtctagatgctcatcctttcaatctctcttgtagactctttttcctatgtttctcttgcaatgttttaggcaatttctaatttggagatagcccatctgtctccagtttcctaagtttacaaactatattacaacacaatctcttggttctagctatgaaccgaactacactcattatcttgggatctatcacttgctaaggtctcagtaatgcagtattaacactgtgataaacacatcccaaacttccaatttctgggttactttttcaatgaattctagttatctttcattttccttcttggactcaaattgacttcacttttcttttctattcagagagcaaggctctcagcatcccactttaccagaagtggaagaagtttgcacaaatgatgttgtacagataaacactgcaatgactttgtcaacttacaaaattactatttgaagaatcaatacctccacgttaagcattcccacccactccatttattcaaataatcctttaaagtccctcttatgacttgtatgaagactttatactggaaaatatttaaagcatttaaatgaatgctgatgtaaattgaacaattttatttttttgtttttttgtttttgtttttatatttatttatttatttatttatttatttatttagagagggtttttctgtggctttggaggctatcctggaactagctcttgaagaccaggctggtctcgaactcacagagatccacctgcctctgcctcccgagtgctggaattaaaggcgtgcgccaccaacgctcagcgaaaattgaacaattttaaaatcgttatttccaaactaggtttctgaagcattgggcaggcattgacttgtatgaatttctttcctagtcaatcattttcctaaactcattcactataatgtttttagccagtcatttaatttatatttccaacattcaaataatcttcaagtagttatctttcaaaatttttatttgtagctgtttcaatctttccccattatgaaacacagtcattctttaagagcttaaggaattgggtacctttgagaattttaattgaatacttgaacgttctcattatgtaaagtatactattgatataaaatatattctctacaaagttaaagatgtttctgcttactaaaagatttgtattcacaatgaatttcaaaattacaaaatgctattagagcctatctcagggatgttttcctttctgagcgtcatcacgtgccaatgaatgcacgttcattcttcttcaaactatctttcttctttcaaactatcagttgaatttgtttgttaataactagagattttcacaactgtaaatgcaagtaaaatagctgtctagtttgtttccctttgtttatgtttcattttttaagagtttggtgttagccttatattgtttctataaaatatattaagattgtgtgtgtgtgtgtgtgtgtgtgtgtgtgtgtgaagactccaacattctaaatctacatctactttttgggtttttttcttttgtttttggtttttgaagtgtgaagtatttttgttttggtctgatagtattagttgatgtagatgctttaaataatacattttaaaatatagtaattggtatttctatggttttatttcactgtgagttaattttcataatttgttttctagaaactaatccacatacaaagtgcttctttttaattaatatctgtaggtcatgacatttaaatttttaattggctttatatctaggatctatttcctgggaaagtagtctgctcacacagtgtttcctaagtaataatcacaaatattacatgctatactcattttcggtcacctttcttttcatatctccttttgtgctctttatagtctatgttggattttttttcttacattcagtttttttttaatttatgtcatagttttaatgaattactgtcagaacacagtctgagaacggaagtcatgtgaaaagacttcctagtgctaatgagaaaactccaagaaatcaagaaaagagtcttgtgacctcagtttcttcaaaacatgaaattgttcttgaaatgtgcttttgtgctcttctaagatagagcagataggagtgagtttgctcagattattcactacaatggctattgttatttgtttataagcctcgatggaaaaacatggttttgcctcttgtggtttatcctccacatgccatttgcccttgtgactgtacgctttactcatcagactcctcttaactctaagagtacaaattgtctgattctctgaataaagttggttattgcacgaggttgttgtctgcctcatatattgactccattctcccaggtccctctgctcttgagtggtgacaaattacctctttttttagaagtcagttttgcagttttggttttcgttttcttgcagttagtatttccttattccaatttcagttttcttatacttaaattggtatctttttattttaaaagtttacttattttaactccaaagtgcggagatttaaccattcctcatatgctgctggacaaaactttcactgaacttgcattctaaatatgtagcgtttatttatttatttatttatttatttatttatttgcattttaatttatgagttagtgattaaatcccaaaattaagtcgtggctattagcgtacccttaatttccatattattcttctgttgttaaacaaatgtcatacaacttgtgacctgtgacttatacttatctggcctggagtgctgtggcttttacagatagcttcttagatacaatgctgttataaatccattaagccaagcttattgattttgactatttgcttttatagtttatcaaagactaggaaagtatgttgaagtggtttaatacactagtgattatttttcttttatatttataatatttggctttgtattattttcttcttattagtacaaacatgtttattgttttgagaatttcattttcgattgtgttattacatattaggtaggcatatctttaatcctcttttacctcatagtctagtttgcctgacaataatcctacaaaccctatgttcttttcacatttttcagatataattgttttattcctttatattgtgggttgaattgtggcccctccccactaaccaccactacctcagaagagaacatcattagaaattaggttgttagacagtttgtcagttaagatgcatttagactgggttagagtgaaccctaattggaatccacatagaaaggggaaatttagacatagagatttgcacacaggagaatgtcatgtaacaggaaagacagcaaagacattcatagtgacaggcaacaaagaggaaaagttagaacacatcccttgggggcaatcaatcctgaagatcccttgttgtcagccttgtccctttcagggcatcaaatcataaatttctgttttgtaagccacctggattgtggtagtttgttgccatagctccagaggctaacatacttcattctgagtcctcgtgtttatttttcttgagtatataaatcttatgaacaggataataattaaccaatgaaagattaacaaggataccatgagacatagaatcagagataaccccgaatgactttgaaaacataactccagtcatgttttaccacctaggctccccaggtagcattcagaacagagtttagataagtcatgattcaggtccacagtgaattagaactctcaatttcctagtggagaaggcttttgggtgcctgtttgttacactctcagtgctgagctatgtgggacaagcctggaggttggaaggagaaccagaccagaccctcgcttgcaatgtcaccctcacctgcaaatttccctccatccacctctgtctgatgcttatagtctccctgtgttcccatctcccactgttttgtggttgaaatgatccagggttttggatggtaattaccaagtatccatttttgaggggtggggaatatatgtattcacttttaaaaacctgatattaccagctgctttgcaattatattgactattttaacatttgtaagtgcattataagctctattaaatagtatattaaggtcatatttttgtattattcaagttttaataaagttcatttttttcattacttttaacttttcaactattttctcagaaatcttatttgtgtattttattttgttcttattttatgtatatgagtgttttgccagtaagtatgtctatgtaccttgtgtgcacctggtgcctgtgaagagggtgtcagatcctttggaactggagttacaggattttgagctacccatggagtttcagggactcttactcagatcctctgaagagcagccagggctcttacccactgagccattatccaaccccaacattatgccttttttattttttattttttttagtttttcctacaatctgaccattcttttctttttcccatagaggactaattttactaaactggtctaattattaactactaaatttacaaagcataaagtttttctgtatctatgtttgtatgctgaaactccatggacattccctctggttttctgagacagcatctcagatataccttaaactcctagtcattatataaattcggccacctaggtgctggagtaaatgagtaacgcaggcactatgaacagacctctgacaattctgattgcatgggagagtattgttaatctaatggttgtttgtattttctttctcttgttggtaagctattttacttgaatattcaaagcacttttttctttcatgttaatagaaaactttgtgacaatccaccagtaatgtgtatcaattattaacatcacctgctattcagagggccctttctattttaaaataacgagcagtttagcctggaagccttttctgttctagcattggatatttcttctcttcagtgttcccctcaccctgagttcccattgtatgattaatctgtctccaataccttcccttcaattttagtaacttctcttcactttttccctaagctacttgaaaaaaaaaatctgtattgtactccaaatcactgttagtcaccttgctgtcacacaacagatgtcagctgcaggtcccagaggtctcagtccatagtcactccactgtttgtaagccagtgatgagtcagcactccaccacagggagagcatggcagaaagaaacatcctgagttatgggaagaggaagagacaaggaacaaagtcacccttcaagcacacgctctcaaagatctactccaacaactggactccacttactaaagtgtctgccacctgtcaacagccttttaagttatgaagccataagtggcttaatgcatttgtgagggcagaatcctggacatttcttcacctcccagagacctaccttcaaaataagagtgtttatgggatactgaagattcatctcaaaactatctttcatcttttttcttcagtattcaatgcatttaatttttaaattcttactacttaaaaccaaccccaagcattttgggtgcagcagtcaagtccagttccaaactgaattccactgataccagtttctacttatagctttggattttgaatctatttctggtatgtgggcttttattttcttttttaatgattatggtcttacaatggtgctctgacattagtttggttaaataaaaattatagaaggttattgttttaaactgagtttctgagtttctgacaagtgcccaacagacctacctaaaccagattgtagtcaaacctgacttctaaagagaccaggtgccaaactatatgaaatagtagctggtcagcagggaccatggactggcataatcaataattcccttccattttcaaacaacaaatacaataactttaaaatgactgactcactttttgtttcattttctctgctaggctcagattattgacgtttcctctactttatgggtgggctgtcactaaattcatacttttctaacagaaaccaatcaaatgttttaagttctattgctcacatttgttctttagcatcctccaagctggtcctttctgaccaatatcggtttcattctgcacagtgtattctctgataggatattgcatcctgtttcatgacctaactggagactacagtattcctgttctttgcttggaaaaacctagaaacaaacagtacaattttctgtgtgtaagttcaatttacttctactatgggaacgattttctaacattttagagagtgagtttagttcctccttcatgttctaattaaaggtaaagcacccagcagtgcactacagggacagttcctgtgtgtcactgttaaatgtctttgctacctttctgctttagtaaagcttctcaagatgtctcaatcattatacttttgatttggaatcaatactcttcttccatggcttggaccccttgtttcaatgctctgatatacataacaccacagactagttactggaaacatagaccatcagagacttacccagggctctagaaattttgatgagactttatataggatactgtaaagatacagtgctcagattaagaatgtaaaaatatagtctaatatattgtaacatgattaatagcaatagctagtacattcaacgaagagttgctaaaatcagtcacacagccagctaaggaatgtggccttggcttctctcttcctagttcaggtaactgtttcctttactccacactacataacccattacaggaaaactgcatgactctatagtcatgacactacagtggtcatgataaagagaaaaccatatttacatcaatcacaaacctgctgtaaagctgctagagaatcaaaaggtcagtctgggagtaaggaagttcccctagagaacaaaagctgaaactgtcacttattcaggggatggaaaatcttgaactatgtcacactgcacagatcaaaactcccagcatgagatgttgggaaagagaagataacagtaatactttgcacttctagggctggaaagttcacagtcagcaatgtggttcctctttgagccctgctagcttagctgctatgcaatagattagcataatgcaagcaatggtgttcacatcacaaccaatttgattcttcatttgtgaagatgtcaggaacctaagaactcctttactatctctttaaatgatggaatttagagtttatcccagtgttcagtttttgttacataaaagatacatacctgtgactgttttaagtatgttaagcatacacatattgcctgtgtgtgtgtgtgtgtgtgtgtgtgtgtgtgtgtgtgtgtgtatgtctatgtctgtgtctgtgtgtgtctgtgtgtgtaacatgtaacatagggtaagaccatagctattccatttaattttaaattagtgaacacacaggacctggaaatagagttcaatgatagcagttgaatagcatgtgcaagacctaggcttcccccaaacctccaaaaatctcagatatattactttgcacataaaaaatgtgcaccttattaataattcccaccattattatttttataaacccaaatcactttctgacctttgcagaaaaggcaactttccagaaaattttattaatttataaaattgtatctacatttggcacttggatctttgaacttctcagtgttaagctacacagaattaaaacaaccacaaagtttacaagaacttgtaggctgtaggttgatgaggggaagcagctcaccttgtaaagtcagaataaaatggaagtatatggacccagcaataaacagcctacctctcaatccttcaccatgagctaacctaatgttgttacttgagaatgcaatgacatcatagacccaaaatttccctttttatccgtgtgtgcccaaacagtaccttgatttaagcaaaaaataatttaagctttattcatttgatcaaaacttatttctggattctgtgtgtgatacaatgttctggagaactgggggcagttaagaaatggtaacataacttacagagggagagaattaacagttctattacctataactatactccgtaatacagaaagataaaggggacaaagcaaagcataaaatgcatttttataaatccatccctgaactgaaaagagaaggaaaagatctccatgaactagaagctgtcaagccaaacaggtgagcagataacttcattagtccagtccacaagggaagtaaacttgaggaagcccaagaggctgtgtgctgggctcagtgatggggaagggtatgtacagccatgagacctacaagataaggaccactgtcaaaatgatgcatgacaactcaagtttcaaagggctacacttttcattgaaaaggcttgggtgggaggattactcctttgcccaacaaataactggcaatgagggttctactcaataaaaagcggtaagtacaataaccccactccacacagaaataaaatgcaaacctcagtcatatccaagaaaattaagattagagctaccaaatgaaaagcaagcaatgcagtttcatgggcagacagatctttgatgatgctggtgtggacaaacttcccttactcctgtgctagagaattgcagtgaggctgactattcccatctcgttacactacttgtagcattctctcctgatacatacttttaaaatttactggaaaacagtgtaccacactattccagcaatagtctcataatccaaacacttcctgaaagcccacttctgaacacagccacattggggaccaagccatcaacatgagagtctgtagaaatatttcatggccaagccaaaacagttgctttctggatgcccctctaatttaacattaacccacaaacagatgctacttacttaccttccaatgacatttttatatctaccacagatccatgatgtctttgtgttccctcagaccaggcagcaccctccctttgtcttctatgcctgaccatgcttagctcacttccactaaggatttaaattgatcattttgtcagccctctctctgttcaaaccctttcatgtttacctgcctaagttagtagaaagcaaactcattaaaaggttacttgcccttgacctctcttttttaattatttaattgctactcatatttacatatccatctcccccattcccttgccctcccatcttcccatgttccccataacccccccaacccacccccaaactcctccccagggatagtgaggccctccaccagggaccttcaaagtctgtcatatcatttgggggagggcctaggccctccttgctgtgtctgggctgcaatagtatcccccccatagggaatgggctcccaaagtccatttgtgctggctccactgttagaggtcccatagactgtcttggcctcctagctggcacccacattcagagggcttattttggtccaatgttgtttccccagctttatgactagggtctccattctctcactaggtgaagtccactgtttctgccagtttctccagacctgtcttggctcctttgctcatcccttctccatctccacaactggattccagtagtatagttcagtgcttagcaatgggtgcctgtttctgcttcgaacagctactggatgaaggctctaggaatggtaaccaaggtagatatcaatctcattataggagaagggcatcaatggcatcctctccaccactgcctggattcttaggtagggtcatccctgtgaatcccctaacattttccatgtgtcagatctctctccaaacctgtactttctccttctatcaaggcatctcctttcttgccctcctctattcctcccctgtctcagtcctcttgttctcctcctgcctagttgtgaaactgcaaatatgtctggacattgctaagtgttttctaggggacaaaactgtctttctattgagagccactgatggatcctattaacaatttctgtgatcatctctagctcacaacaaacaaatgtccagagaggaacactccaattcaagccacagtctgaattgagattgagacccaagcttaattgttccagtattcagactgtaacagagcctatttttataggaacaaaaatcaaacctgaagtgattgaagaaagaaagtgattagccatctagacaggctttggcattaaatgttgatatcaagagaggtctggcttgaatcggagtgttcctctctggacatttgtttgttgtgaactagagataatcacagaaattgttcataggatcaatcagtggctctcaatagaaagacagttttgtaccctagaaaacacttagcaatatctggacacatttgcagtttcacaactaggcaggtactacttacattcaaggctgcaactttacatcgtacagtacaatgaacagacacatagaagaatgacttagctcccaaagccaactgtactgtgtttgcataaatatggattatattgtatggtttaagtgactcagtatgtgtaaaacacatgtaatgtggtcacatagaaagtactgcttaattgtctgaatatattcattatataatacattataattaagtataatatacaaatcatatatgtaatttctcttaaataatctatttaagaatagattattataatgtactgtaaaatgtgtgcctatatctacatgttgtatatattcagctttgtatttttttttttcaaattttctttttgctagctgttcctccttgtcccaatttctctcaccacagacaacacaaaatttattctctcactcctaggtcttcctgaaatatcttatcagagactcctctgaacatcttaccaaaacagcagcaatcttgcctctcttctttcaccttatagcatttcagtatctaaaatactatacgtttattgactgattcttgtgtggactccaacaacagttgtttgcataagcacattgtgcttatactatactaaacatggatgttaatgatacaaatggattgcaagatgcttgcaggcaacagtcaaaatgtatggtgtagggagctgcagaaaaccgcacccaaaagatggcgccggtttccgccctccgccagcccgacggcgagcgctctctgtggtaaacaactccaaattaggcaaaggtcatgtatcctcttaattctgcttggagacaacctatcctggcgcgccacgtagggttaggtgattggtagatgtagactatatcaggccccgtctccctcggcccggggccgccgcctccattatacattgtacaaagcaaagaggttcccgattaaactgtgtttgaagaagattcctcggtgtggcgtctttcttgctggtcaagggtggacgccgcaagtggtggcccgtacggggacgccgccaccgccgcgagtggtggcccgtacgtacggggaattcagaacttctcacagtcggggcggcgccggtaagttcccaaggtaagtggaactgtaaagtccgcggtgaatgcggagataggtctccggtaaaggagcaccaaggtcctcgggaaagaggagataggtctccggtaaaggagcaccaaggtcctcgggaaagaggcgataaagtctccggtaaaggagcaccaaggtcctcgggaaagaggcgataaagtctccggtaaaggagcaccaaagcccttgggaaagaggcaataaagtctccggtaaaggagcaccaaagccctcgggaaagaggcagtaaagtctctggaaaggagcaacactgttcgcgacaaaagcgaaccgaaagtaaaaaacctcgcttctgctttaatttgcagagtgagagtaagttaatggaccccgctattatagtggtgatttggctgccttttaacatcgcagcctcaggcaatctcactgtggctagttgggataagcttggaaaagatctagattttgcctgggcacagggaacgctgaagccagggacgaggcctatttggaaaatggttcgcagctgtctagaggatcaaagatgccgcaaggctgtagaagaggggcaggaggtggtagaacagctgaaggaaataaatagatgcaagtcatggggcctgtgcagcgtggtttaccattgctgtcagccctacccaatcatgaagaacctgatttgtgatgtgtgcaggatagtgttaggtttgcttttactttaccttctattctccataccattatatgagtgggtggttttaccccagggtatggccaatagccccactatgtgtcagctttttgtgtgtcatgctattgctcctattagagagaaataccctgctgtgagatgtgttcactatatggatgacattctcttaactagtaaggagttgaaattgctgcacttagcatatggagattgcattggatatccaatctacccttaatgctcaattgaaaggtggcattatggttttgaatcaacacattgatctattgcaggaacaattggatactttatggtaactggcacagttgggatgtgaatggagaatgcctggtttgtgtataacagctgtttcctatcagaattattccttagcagcaaatatgtctaaacaaccttcatagtatcttctaggcaactggtctggggattttgacaagctgatgcaggagctgagactctccatagtgcatgtgaattccaccagggtcgacatctcggttgcggaaggactgtctgcgtggatcactcaagccatgaatcatctgaaagagtgggcaggaatgggtgccctgggaggaatgcttatcctagttagtttcatagcgttatggtgtatctgcaggatgagggtcacacagcagagaagtaataccatgattgcacaagcctttagtttagttaaggaatgggctggaataggggttatgttttccatgatgctgttagccatttttgtttgcttgtggtgcctatgcaggatcaggaagtcgcaaaaatcccaagctgctatgttggtacaggcctttgctgctgtggaagcaggacagtcccctcaagcatggttatccatgctgacagacaaatagatgtctgtctcgcccttgctgagtgagtgatgcgtatctgaatcagtcatgctcaatgacgggcacctaccctcatgctgagcgaataagcatacatgtgttcccttcaacctaagacatgagcctgtgagggcgacacagtgactctttgacgggtaagatagggacactggggttgaacctaagacagagatgactgaaatctgacaacagatagatactgctactcctataatattaaaacaaaaagggggaactgtagggagctgcagaaaaccgcacccaaaagatggcgccggtttccgccctccgccagcccgacggcgagcgctctctgtggtaaacaactccaaattaggcaaaggtcatgtatcctcttaattctgcttggagacaacctatcctggcgcgccacgtagggttaggtgattggtagatgtagactatatcaggccccgtctccctcggcccggggccgccgccgccattatacattgtacaaagcaaagaggttcccgattaaactgtgtttgaagaagattcctcggtgtggcgtctttcttgctggtcaagggtggacgccgcagtatggcatgttttattctgtatgttctagagcaacactcagcaatcattaagtgttcaaccagcattgtaaaggtgtccaaaagacagctggggggcatggttcttgaagtgttcaaagagtatgcagtaaaataaggacactctggagtcatttaaactatgcaattatctagatagttccaacccagaaaacaccttttaataaaaatagataccaaagagtcacttaactggtctttgcttctagcatcaactttggttctaacataagtccctacatgtttcctctgaagctgtcattaactggtaactgtggaatataattcagacagtaccttaattgccaggtggacaataaggaagtggagaataaggaaggaaagcaactggtgttttcttgagtaaatatgaaataaagtaactcaaatgtgaagagcatatgtgagactcccagtgcatctgcacttggggcaaaatgggattgtgaagatatgctgtcatgtgggaaaagtcccctttattacaaatatactcccacaagtggcagtttcctaccaaaatggtgccacattctccacacatcatctgtctcctgtgacaaaagcaagcaaagtacaagccatatctgggtgctctcatgtctcctgagactgcactgatcatttcatatggtgtttagagaaggaagcactgctttagtgctagcaaaaacagccacaggcagaccatgctccatattcactagcacagaacttcaaataagaatctccaagaggtgatgtcagctgaccagtggtctgctgggaagtgatgtcagctgaccagtgatgtctgctccttttgtgaagtttttatttttcatagctcagtggtgcagtaaaaactattttgttatattcaattataaaaaaatcaagttgctgaatacccaattcctcacaaaattgcaactgtactcaagaaataaccaattttaaactgtttgtatgtgcttgtttgttgtgcgactttcccagcacatattttttttctgagcgctaaagagtaagaaatactccctagagagcaggtgtttctctaattcttggttctgtcccatactatcactaacttaaggtgaacacactgtccttccacaagattatttactatattcttccttccctttgcactccctttgctgcgattattgacctcatttttttcctcccaacagccttgaacatccctagcttttctttctcacagcatgtggaaacttccttttctacctaccctggttgtctcttcttccattcacactttcaatacataccgtgaacctcttgcatgaatacttgaggctgtatcagtcctctaagctcatagccatcacttcaaacttgtgtttgtttcaaaggtagtgaaggattagagagaaggctcagcagttaagagcacttgctgcttattctgaaggactcacgtttggttcctagcacttacattaggcagctcacagctgttcataattccaactacaagggatctggggccctcttctggcctccagggcgcccacacacatgtgtatacactcacatagatatataaatgaaaacaaaaataaatattttaaaattgagttatataaatatataaagtcaaatgtctcaaacattattttttatattatgaatatttcttgtaactagtgcctaggtcagaaaaaagaacactgctccaaggaaagtacaaggttagattcctgtgagcctttggacatggcatttccatcacctactaaataattaaccttgcttcacatatgtttttgtcacctcatttgatgtatactgctgatcccttagcattgaattcatggctagcaaaactgttactcatgcctgaattaacacattttcccctttggagcataccgtggcatcttgctcttgggaggtggtgtcagctgtggaaagcgctaaaggctacacttgggggccattttaaacagagaaaccagcaacaagaatcacaaaatgtgaaggtgcccctaactcaattaccagatggacatcatgtatagtgctgccagtgaaacagaagagcttggccttgactgtcctcagtgaaacatacctattaagtccttgagatattcaccactctgagcacacccatgaatcactacgaacaacccacaaaggatcttgggggtatacatcaaccttagtgagtagacaaatttgaaattaagttatctcccagtaattagtaccaactgtagctaaaagagcttgaagagaagtaagaagtgtcaattagggaggcacagtgactccatcatgtcaagggagtaaacagtttctggagggctgagggtaagtgttcagtgagtcagagagctagaagggcaaagaagaaaactgaaaggcattctaaatggagaagatgcactggtaaatggaacagaaattaaaacaattctacctattttttaacctaatttaggaacacagccaaaataacctaggcatttgaagggctaagaaatctacaaattggcagatctagctactgtgttaggaatcaactctcaaacaaatgagcttcaaaacaggaaggtagaaaggtgttgtccatagctaataaaatggctacaaaaggaaaaatagtgtttgacacatttgccttttcataaattctgagtctctttcccaagctgtaaaattagctggctcagtgaaggaaagtggctactctgagatacacaactctctacaaaatctaaatggacttattcataaccataaacatctctcacctcctaaaattacaaataaaaaattaaacattgaggctataataagatgctcaaaaacaccaagaaaacttttaaaaatcaaaccaataaatacatcttatttttattcttttaaacagtatctcacaatgtagccctggttagcctggaattcactatgttgaccagactagccttgacctcagagatctgcctgactctggaagtaaaagcatatgccaccagatctggcttagaatatcttttcacagctaaaaaatttaaatataattaaagaaacaaatttctcaatttgtaaagtggttactaggttgatgaccagagtgaatttactacaagagaagggagatgtcttcaacttttagaaatcaaggaatcactaaccttttattttatgcctgggtaaaacacctagtgacaaaacccctgtggccctatttgtataatattctttctattttcaatcatttctgttacaccactggtataaaaccatgacaggccagaataaagggagagatttcagaaagtgaacaaatgactatgtaaacatagtttgacaacttaggtcaacagtgataaaatacttttaagtaaactaaatgttgacccccccgaagcccctcaacatagtaaatgtgtcagaatgagtcataagagcaactagtgtggagttccactttgagcatgattgagttcctcctacactgatacccagtggccccatcctccagatgatggctggaaattaagcaaaatataaaacccaccgcttaaagcactgaggcatggagcacactcacaaggcttgagggaaagccgtatttaaaggacttgatatgtttatcagcctaaaaatacagaagccagaggcagcaggtatcacagccatttgagagtgagaggtgttctagaaaagccagtggtgggaagcctcaccttccttgcgaaagtcctgcccaaggctctgaaaaccttcatccacatacatgttggacaaactggggtcagcctgaaagaataaacagagctggcatttgggctctcagaaaagggagtttaaaatgaggatggaagcagcaaacctgattgaaaaataggagcactctccagagaaataataaaaccagagagtcactacaaccattcccagtggatagataagcaatgatctgaaattgctcactacatggcaaaccagggaaacaaagttccttcacaagataaagcgtaatcaatgaacatcattccagatatggttaatctagatgttggattgagagactatgatcttaagcataccaacaaggattttgagctcaatggtgtaaagtacaagaatgagtgaaaaaataggaaatgtctgtagagaaattgaaaatctatatgtgtgtatgtatatatgtggggagagaaagaatgtaaagcctagattgtaaatacaccatatattatacattttttaaagcttaaagcagaatctgaaaggcagacatgatgagttactaggaaatgcctagtttccctttcttctgaacctagtgctggactgtttccagccctacctgctactgggtgtaatagatcatgagggaggggtcttaatgaattggattagtacatctataaaaggccctttagggagttcatttcacacctttggcattagaggttacagcaaggagatgaacagatgtcagtgaacaaaaaggaagttggttctctgtggacgccaaacctgctgcatcttaacctcagatttcccagactctggaatgggagaaattaacttttgtggcttagaagtcacctccctttatgaaatcttgctatgaagctttaatggattaaggtactcttcctgagataatcatgaacaataattataaatggcaatagttaatctaagaacatttgcatatattttcataatctaatactttattttgtgagaacgaagcctgcctgtgctggctccaccacgttctcaggtccacaaaggtaacacaaccccacacctaaggcttagagaacattgcagaatcagtagcttgggttttctgttgctgtaacaaatactatgaccaaaaatcaagttggggaggaaaaggtttatttggcttatagtttcacatcctagtccatcattggaggaaatcagaacaggaactcaagcaggggaacctggaggcaggagctgacgcagaggccggggaggggtgctgcttactagcttgcttcccatggcttgctcagcttgctttcttttagaatccaggacctccaacccaggggtggccccacccacaaaaagctaggccctctctgacccatcataaactaagaaaatgccttacaactggatcttatggtggcattttatcgattaatgtttgctccttccagaaaactctaatttgtatgtcatgctgatgtaacactagccagaacagacagacagattctaagaactagaggaccagagtatttaatatgaggtagagtcttccatatatgactgggaagctatacccatgaaatctcaataatattgttgcctaaacaatacttgtataatgacaacatatatcaatgatgatgaggggaacatctcaaggtctcagacctagatgaagagctatagtcaattaatggctgctgaaagaggcaaaaaaaatcagtcttccccaagcatgtgcctcctgataggttatacaatcccaagtagtcagccctacacatgtacacatatgagaaacaataaatcaactcagggagttatatacaaatgtaaatataaacgtgtaataatcaaagaggccaataatttgagaggaacttagagccgtagaaactgaaaggagagatggaggcatggaaatgatgtaaacaaaatactcatgtatgaaattctcataaaagatttaaataaaatctttcttttgccaaattgattcacctgatattaacaataacctttgatttaaatatgacaactgttaatatctgtgctttgtacaatgaacaatgaaggaagagggagtgaaaagagagaggagggaactacaagattttagccaggtgactgaaaatcatgaggcaaccagcctcattaaggtgtcactctttaaggaggactctgagagctgttaagagtttatcaccttgttccatctaaagatgatattcaaacaccaactccagcagaggctctcatctttacaaattgcacgtcctataggacacagattttatcaatgttcttttgggaatctgatcttatcacaccaacaaaccatactgataagttgaaagccagtatgaaatcctccagcaggcaatagctttagtggctggctagatttgcagcatgcttggcagagttcagctgctcagttggagctgcacacaagccctgtgctctgtgctatgacctttcctgcaacttcccatggctcctgagcagggtctctcacaagtgatcacaagtgggatttttttcctcttctggctaaaacctgtgcctcgtgtatttgcttgtcaaattgggaggttgtagaagagaggggttagaaatgttgttttattgttttatttcatagtaagaagaggtgtaaccttgcagaaagggtgacaaattcagttatagtcagccagctcttgacaggctttatcagaaaaccaaacaagggaagagtatgtatgtctgctaccagctgtcacagtattgaacaatgaatgtttgatgaagccgacctgcaaatacacacagctctgtggaagtcggctttaagtagcaactagctgacaaaattaacaagaaaaggccttggtagaggatatcaaaagaaaagaaaaaatgaaaagctcccacttcctttatttattcgggtatgtgtggaaagagcctgcaggcaaggtggaatctgaaatgaagttgcagttttgttaagataaatacaggctcttccttccagcccatgtaggaagtacggtttggataattgtcagatttttcaaattagtcttgctgtgcaaaatagaaacaggtcagcaggaaataagagcctggctgagcttcttcttgacagggtgggagacagtgaaaccatccagagtgtaatgaagagacccacccaggtgctagcgttgcacaggccagccctacatgggcagaacctcatcattttttcctttttccaaataaaaggtctttatgcaatacaacgtggttggccctgaattcatataaacacaagccacactgaatgaactcagcaggttatatttatatatttggatatttacgcatatgtaacaggaataatcacagaaaaaaaggcaatcaatttgagagaatggggaaaacagggaaaggggagtacatggtagtgtttgaagggaagaaaggaaatgggaaatgatgtgattatattttaattaaaatttttagtaaaaaataagaacaacatttaaaagggggtgggttcttcatctgacaactataaaaatatctctccctctcaagttaaaatgaagggtgttcttttcacctttaagtgaacatgtcatgataagccccattttacttaaaaaaaaaagagaaagaattttcaactaggagaggatcaaataatattgaaaccatttttcaaatcaatgaaaataaaatctgtcatcatcaaccacctctcccagtgttttcatttgtacatttttgtaactgtcactaagtcctgttgacagctagacttgtgtcactcttgcgagttatcctatgagcttctggatgacaaggattactcccccacttagctctgattcttttcaagtctgactccagccattgctcactcagggtgagtgatgacaaaatcaactgcagcactgagacacagaagtctcgctgggagcaggcgatgtctgtcccacactgcatcccacagttcctatgtttagctctcctgacattcctcagcaaagcagaataatccccactgtggaagaaagatgtcaaggagcaaacccccgcacttcccattcagcctggaaaacaagcagaaaacccacaagaatatccacatccattcccccagacagcactcttaataggaggtaatatagcataattaaacactctcccaacacaaggaagaattttcacatgtctgctttccgtgtgagttttctttctgcccattcatttctgagctcctgtttgataacatctagtgtttgacagtgaatgcagtggccttgtaaatataaatgatgtgttctctcaatctgaaaagccacaaatattatctcttggggcttctgcttcttatctctgcctctccaaattttttcagtctatagtgagtagcagagtttttttaaaaaaaatttatgtatgtcttattatttgtctatttccatagtagttgaataacgtttagtcttagcaatagagatacaggggtgaaaaaaggccatgaccgagtctataagattataaagttgtgttaccttcacactgcacagatgtgggttaccatcacccaaaagggcgagagttagctagagtttgatgttctcctattaaaaacctgaaagggataggaggtgtgtagtactcatataaagcagtatcacaggactgctttatccacaaagaggataacgttaaaatgagctctttggaaatgagtgaaaagaatcagatgccagggttaagcttccaattgctgtagtgtagaaatgcattgacagtgagcttctctttgagcattacggggaaatatgctaagatgcctggcgtctatgtttggtgtaaacactaaggctagactgatttatacacccttgttttccatgattgaaagcatcactggggacagtttctgtgacttccataaccccacacctccaggagaaggacaaggaggaagatgagaagatgaagaagaacagtagaggctaagcaggcagaaacagaataaatggctaacttcaggtacacagattgtaggcatacatgtcctcttctcagagattcctacccacagtgaaaatcgaggggaagtgcttttcaagtctcaccttcctcatctcctatagacaaatatagccggatccacaaaagtccattcaaatgagcatcaaggattcattataaaacactcatggatatacaacaaggtagagctgctgtggtcttccagtcttctccggggtggggaagaggtgaatggaatcaacagacgatactagagagcagagaacatgctgctacccctctttcctttaaaggggttatgtggccagacaagaagatctgcctctattgggccagattgtccccaaggtcatgggcaggatgaatacccactacacactccctccaaggcagtggttctcaaccttcctaatgctgcaaccctttaatacagttcttcatactgtggtgacccccaaccataacattattttcattgctactccgtaactgtaattttgccactgtcatgaagcataatgtaaatatctgatatgcagggtatctgatgtctgatccctgtgaaaaggcagttggaaaccccagatgggtcatgacctgcaggttgacaactactgctctaagtgtgtctgtattacaaagtcatatcacagggttgtgaaatagatgtgataccatcacacaacacctctttttaaaatcttgctaaaccaaagattcaatgggacttgcagtacattcctgtcctagaacttttctgtcactgaggaaaatgtggactgccctaatatcttagtagttagcatgcattttacagaagaacaagtaactgaactattgagggggtaaaaagagtttctcaaaattcaatgagaacttagtgtctgaagaagctgattttcgtgacagaaagttaacatctatcttaaagattttattacaaacatgggtgcagttcaccagtatatgtataagaaaatatatattatttaaatgtgtgcttttctatctacttttcttttggggggaaaagctgaagcttttcatgtggactctttgcctgaattcaaagcatgtgcataaccatagatggggatagtgcaatatttatgctcttaatctccatataacgcagagagaatgctcatgattgtttgcctattaataaagcactcaaagatgctgccttcaaaactgctggaatggaaagattaaacatgtagagaaacccaaagagctgccttcacatgtccctggctgtaactactacgacatcctgttgagtggaaatcactttcctcaatgatcagattcaaaaaccaccaagaatggcgctgtccccaaatatcaccttgcctggaactctgccagcagaatctgcctttaggctagaaggaaataatgagtacttcttactgactggtgagagtatatatgatttattttttctctacacatttgcctccctggttaattcaatggtgatatcaaagtgaatgatgaaaatggctcttgggaagaaaaacttggctaatgaatagtattatagtcccaggcttttctagtagatctgtaaacacatggttgacactcaaagtatgtgttttagacagagatatctatttcttgtgatccgggcattctctacgggagttactggttggaagtgccttaaggaaatgacacattttcagcacttctctgactttcgtaaatgactgagtcaccagtattggcaaacctgcaaaaggcttgttgcttatatcttagtgaacctggactttagtagctactaggaagaggagcagagggaaactaaagagacccgtctgctgatagccttccgaatgttgtctgcattgtttaagtagccagaaaggataagagcagtctcaggatcttccacaaaccacagtcagtgttggtgcaccaggagccactgggaagcagatgagtcaggcctttctccttagtgtcttccaggttccctgtctccacttcaattgcagcagttcggttttgcttggtttaatggctgcgggggcggggggggcggggctcacataatatgtgaggcaaaggactccgctgctgacggtttaaaaaaaagaaaaaaattaaaaaaagatacagctccatcagtttctagtgcggtcctgaaggaatttctacttctaaatgcaaatggctggaaaggccaaagaaaggaaaggactgtggacttagtgaagtgataagagaaaaatctccactctattatgcaagcctggaggaaaggatggtttataaacattggttttgcagtccatcagggcgccaggaccctgcgttgccaagggacacctccagcgctgaaatgaaataagaagaccggtgtttgcattaacatccccatttgattcactgtttgattaagacaaaggagaggtagacagcagcctccactgcccggcttcctgcctggagaaaaggcaggacacagagaagctgtgtgcaatggcccggtctgggcaaagagcaaacctgcacatcacggctgcaaagcaggcttcactttgccccacccacatctccgggtccttccagtccaagctctgaaaggtgccaggacagtggacgcttcacctcttcagcaagtgagaggcaagtatgaaaacaaagattttggaatcctgcaagggtggggttgggacatgaagatctcatttgttagaaagtctgggcacctatctccatctgatgtttatccttttcctcttaaggtgaactgaaaaagtgggagtgttgcccctacaccagtggagaatgggcactgctcctgaccagctcctctgggtccccatccttctgaggaactgcccctagcagcacaagaccttctccgtgttggaagcttgactgtaaatagagagggcccccaggtaacaatggatagatctgtaatatttcactctatagtagagcaaaaagttactcatttatccattgtgcttgtcattttccatacagaatttaaaacgtgtcacatgagccactcaacatgttattttcagatagactttgtgatagatgaacttctttctctataggctagtagtggacgtttctgactacatttaaggcaggcagggataactatggtagattcggtgaaatcttacattttcaacttacaaattgttcttaagacagaagaatcagtagtttctttagtatgaattagaaaaatctatataatatttcctacaataccatcaagctctcccatccacacttcaatttttttttgaatgaaagataactaggtgatcataaaaatggccaggaaatcattgaaaacagtacccttagccatgtatgaaccttgtgggaaggttcttgaaatgtaacaacagagagtaaaactcactcctttgaacacactctcaaactctcagcatgagaatgttaacctttcaaacatcgcctacaccattgccaaggagagacaggttctcttaccaacagaacaatatatttctttcagttttatcacaattcctaaaccaaatgcctaccataattcctggatccctaggcagtaaagagagcaatgcacataaccccaagtctgaagccatggctacttgtggtgattgcctttgcagtgttcactgtatggccagcatgaaaatttggaaatcctggtggcattgacactgactttgttcccagatgtctttcatgtgatgtgacaacaatgccttaccactaggccacatctctaagaaaacattgaaaggcaaacataaacaaaaacccctgaaaacccagaacataaaggaaatcgggacggtatcaactgcccagcatcccgtctctaaatcagtctcccattgactctgacctaagtgtgacttcctttctcctccttacaccacatatagttcattctgtctgtgtaaaaccatggctcgaataccaaaggaaataagatagttcactctagattcagatatgagtgacattgtccaagagtccaatgggagtgtccatggccctgaaacacagatccacactaccccaaataccatgtttgaatgtactcatagtttatgattttttttttacagtaacaaaagaaagtaagctataaatctagacactgttaaaatatgttggtagatatatccggtaggtaagttacagcaaagcaaggatgtctttgcttttgcgttagtgaaagctaagactgttagtgtatcccaaaaaaaggtttgcgtgatagccataaggatgttagggcacccacagagatgttcaataaatgactatttagggactaagttaatttgactgtggacctgtaacattccaactcccctcaaacatataacttcaattcagttattcagtcctatgaaatgcattacattgtgcatcatttttcttcctctgggaatgagccatttagcatttccttcctgtacttctccttagtttactttcacaaacacttgttggcaacttgagccagaaattatgcttagctaaaaatagtatttttaatatcacttcccaaacttcattcttatattctcattgaaagtgttttccccttatatctgtgaccttcggctgaagcatgatgatgtgtctttctttcccatcctttcttttcccagtccttcacagaactaatagccgctttcccatgttttgttaagacttaaactcatcctcttccttcacacctgccgcttcactcagtcacctacacacgctgcctttgaaaaattgatatctcgaccctttcttgatttcagcccagcctccacccctattgcaggctccacccccatgaccgtgccttttacctcctcattattgagatcttggtccacaactgaaactaccatacagaatccctgtctctgtccgccacttccttcctttcctgccagcctctcactcactccaaaccagagctgctcagcttttctaagacatgagtctttgacctttactgctccctgtctgtgtgtcaccccttctacagctcaaaccctgagagctaaatgcctccgccgcattcttctaaatagtccccatgtctgctattcactatgggtccttcataatgatctgactaagaaaggcagaacttgtccttctcttgtctttcttctttctggtacttgagtgatttttgctcattctctgaagcaaactttctttgtttatgtggctgttagctgaacttctttgttccttgggatgatgggatatggaagacacatgccatgcctgtatttcttgggttatttttccatatggccagctgatggccgcatgataggaggtaaattatactaagcttgatttctatgttctttccctaggtacagtgtcctgtcttaatcaccactgccattccattggggctagagagacctcagattggccttgggaaaagggaagagaacagataaagcaacttgactttgttgaatctgtaggccctgcccaaactggtagacacagagactggttgagaatgcatggactggagcctttccaactggggagaagtgtcacatagactgtttctagtaagttggcacctagagaacttaaacaccagccaacacaaagggcatagatctgtgtggttttcaaaaacctttctagtcaaagaaagcaagcgaagatgggaggaaggacagaggtaagaaagagacgaaagagtgaatgaaataaaatgaaacaggtcctgctctccgggaattcactgtctagtggtaaagtgaattgctttaggacaagtgtcaaccaacaaatgtgagcaaggtgcttaaaaggcccaggcaaagggcaggaagagaaaaaaaaacattgctgcaatcttcacttgcaacagcagcaacagcagcaacagcaggcactattttcaccaataaatcaaactacgttgagacatagaagattgccatgatgaaacaattattctgtacaattaatacacagtggttagacagaaaaaattaaaagtcttcatatagaaacataaattacttttaaggaatagtcatacttagatactctatatggggtctaaagggcagccgccactccctgggggggggggactctagaaaaaataaaaacaaaaaaacctgcaaccagagctgatgttttcgaaatctatgaagcttagaaaatggactttgaagtcagtcacatatctgtcgtctgtctatgtgatctgcaaaagtcacctaactatttatgcctccacttctttgtaaaacaggtctgagtacagtaatgtcaccctcacaggctgatggctgggattatttaaggtagtgctaaccagatgtctaattgtgtcccttgctattattcacacgactctattttcactcccggattttctttgatatcttaaccagagttcaccaaggtaaaatcttcaaggatggggacagggactgcaaagatccccatgtgctggaaagaatgtcaccttgatgttgactatctcatcattgctagagcgactaatgtgttccagctttttttagtctctggctccacacctagtaagaggtgtggaagaagatatgaatttagctgagcatgagcaaaatatgaagaagtttcatgtcctttgattacttctgtgcatgttagaacttgtgtggtcatgaggtagagaagagccaatgctgcaataaagctagacacgattgctttctcatcatggaagtacaagatacttacacttctctgacagtttccaaagtcctctttaattataaaaatgaattctatttctttagtgtgtgggggtgtgcacatgcacacactatgggttcaaaggacaactttcaggaatcagttctctccttctaccatgtgggtccttgagatgaacctcaggccacaggggtgacatcaagtatctttacctgctgagccccactggccccagtggctgtttccaattgcttcaaagcagctgatctcagaagcaaggagatcataaaactgacatgcataatctccaagtgggttttatgactcctcctttaaacattctgcaattctacatttcaccttgctttttggtctgtactaaaatgggactatcttctgatcttctaaggaatagagactttaagatgttaccactccttcttacattaggataaaggagttgatagtctctcctgagacttttaagattttaataaaccaggtagaggaaaggcatcaacaactcactaagattctcaaagtataatgacaaaaaacagctaaaaataattagaaggaagttatccacccaagaaagtaaatgggaaattgggatttttttcatctatttacttatttagaaacagagtcttcatgtattgcccaagctgagcttgaacttgtgatcctcatatctcaacctcacaaatatctggggtcacaggccagtgccaatggaacttttttttaaacaatgagttatccttgatgttagcctaatggtatacaacttttacagtgtctgcagaagaggtctgagaccttttcaatgcctgggaaaagaaaaagaaaatgtataaatgggtttccctcttttccaagcagattgtagttttaatatactggcaatttggtaactaatattttgcactatattagcattcaggcagatggtttattcattcaaattgggaagcgatgaaggaagcaatattctgctgaagtttatcaaatgtaggttttatgtatcttatgctgagccccattacaatacaaaataaagttattgtcaaatcaaagtcaagacatttctcacatttatattttgttacctaaatagacatatctaagagatataattctttacctatgagtctgaatatatttgaaatcaggtctcttctcaaatacttaagcagtatcacaaatagctctgtgtttgatgggaagggcaaacataaagtcacatgacttctgtgcatctttattccatctctgacgctgctttgatgtgattgtcagtggttccactttctcctttaaacaaaataatacctacctatgagcattgtgtggcaaaggttaaatgaaatattatgtgtgtttgtgctctggatactgaagtatgtattttcagtctgtgaattttttatacattaggtggagatatttaaaatgatttttctattgcccctcacaaaacatagctattatatataaaagacatggtcagaaaattttgtgcttatatataaaggatggcccttaaaatatctagatacattcatgatgccaaatgtcatctcaaagaactatctgcttcaacctcagttcctcaaataaaatactgtctgccgtctactagcccatagagtttgtcaatggctgactcgctgtgacctgatcaagtgctgtctgtaaagtcatctacacagtgcaatacactcacacgtggtagctgccacaactcaattgtctccccacatccttgttgccttttctaaggaatccccatcccattaaagtctccctgggataagtccattggaggggtctttcattgttcactatacaccttccttgtcagcatccccatgtgaacacagagcactaacacaagctctttcagggtagaggctttgcttgctcactgccgtgtctgctggacctacagaagcgctcaagaaatagacatcaaacagtgagtatcctgcaatgccctgtcgtcccccgtctcagccaggtctgttgacaccagacacattttttttccttcagaactttgaaacttctggatcaatagttccacttctaaccatgatttctccctggcagtcccattattggatactgaagtatcaaggctatttccccagagctctagaaatatgagctaacagattgtgaaccaccaaacatctccttccagctcacttagaacattgccagtgacagtaatgttgacagttttcacatcagaaaatataggtataatgtgatttcagtcattcatctcctcgggtgatgggtgggattctgagcactgtttttagatgctcggtgaggaatctatgctcatccattcctccctccttttggcaggctgccatctcactgtcatcttaagactctccccacacaggaagaacagacaggttagtgtttgctaacttccatgctggcttcagtatggtatcaagaatttacgttcaattacttacacccactcctatcactcctttgtaattgcaggtataaagacacacttctttgttcctttctacacttggagttttattcctatttaaagtgagatttggcaatcttgtcaaagtggtattctcagtcccactattattctgtggaatgccactactaaagtgagattagtggtttgtgaacaaatactgatttacttcagaatcctttcatccaaaacctaaaaagtgatttgtaagcactagggtcccttctcttgtggggcaaggagacagtgataatgggagtggtgtctattttataggagcaagagtaaagacatatgttagtttgtaaggggagaggttgcagtggttattgtaagtttttccattgttctgagaaatcacagatgtgttggaaagttagatgtaatgacagtagctcccaagtcttttttaatgtaagttggggcaggaccaagcctccccactacccacccgactccaaactaaggctgagcatgtcatgccaccatagggaatgggcttcaacaagctaactcatgcaccatggatagatcctggtcccactgccaggggtccctcaggttgcccaagcttcacgacatgtggaggacctagttggatcccatgcaggcttcacaactgtcagtctaaagttcatgagctccaacaagctttgttcagctgtctgtagatttccccttcatgatcttgacctccttttctcatgtattttttcctccctctcttggactggattcccagagctcagactggtgcttggttgtggatatctgcatcaggtcccatcaattattggataaaggctctatgatgatagttgggatagtcaccaatctgattacaggaaagaccagttccggcatcctctccactatcaagaagagttttggctggtgtcctccttgtggattcgggtgatctcaatcctgacatcattctgtaatgataagtctttagggccccaaataacacacagagacttatattattttacattgctgctggccaattgactaggatttcttatatgctagctcagtcttaattatcataaatctatatatttttataagacttaccttatcaaggatgccttctgctggcgtcctcttcctgggatcacatggcagttctggagcagagaagagagcaggagcaagaggaagagcaagaggacaatttccttcttgtccctgctatatatgagtctgccagctatgtcacttcctgtccagatctctactaggagcctccttgactcccagtcccacctatcttactttcctattggccaacagtactttatttatcaaccaataagataaacatgtatacagaaagacatcccccatcatttccctagcaccaggtttctccctaagcccatagtggttccctcacactggtacatctttcttcttctccaaattaccccaatcaagagggaagttattgacatctttctgttctaagacattgggttttgccttttggtttatgtcagtgatcttggcagacttttcctgaaggtgttttgagctctgcaaacatcagcagcctcctatagcactcctttggctcttcaatgcaagtatttgtccttccttgaatttgtggttctggggtataaaagctacaaaggcttttttttttttatgtgtcagcttgattgaacaatagagtgctctgatatttggttaattactattctgagtgtctatgagggtggttcctgctgaatcattcagatcaatcataattcaggttcagaaactccacttactcttgacaaatttttgaggtgtttgtatttgtctaagttccagtggaaacaggaccaaccaataagatatgcatataccataatcacatagaaaccactatagactagacaaactgtgaagaattggctgtcttatagttttggagactaagacctccagtcatcaaactgaaagcacttgagagccagtggtagaattcctatctaaggtagaatccaatggaaagagaagaccaatgtttcaattcaaaggcaatcacacagaaagaggactccttcatcactcagccttgtaatcttttcagactcttaaacaactggaggagacctatgtacaaagggagggctatcttattttctcattgcaccaattcatatgtagtctcaacaggaacccaaaggtgggaactggagaaaggccacagaacaatgtcttcccttcttctagagcaaaagtccttcctgagcaaaggactaccttctcagtattggcactgcccacagttagctagattctcctccatcacttagcaatgaagaaaatatcctacagacatacttacaggccagtctgatataggcagcttttcagttgaggtttcatcttcctgagtgtcttagtcagggttaccattgctgtggtcaaatgccataaccaaaagtgaattggggcggaaagggcttatttggcttacacttccacatcatagatcatcattgaaggaagtcaggacaggaacacaaatagggcaggaacttggaggcaggagctgatgaagaagccgtggtggggtgccacttatttgtttgttccttgtggcttggacacaatagcctacacctggatcttatggaggcattttctcaactgagggtccctttccttagatgactatagcatgtgtcaagttgacagaaaagtagccagcacaccagctatgtcaagttgacaagcaggagtagccagcacacacagcaagcacttttacccactgaataatctttccagctcctgaagattaatctttacaaaaggctgcctttggaagaaagagaggacccaacttggggaatctcaccatatgaaatagaagaaaaatattgccttcaagaaaaaaaatctcttcattctttctctgcattatttatggtcatatcatgaagcaggatatagttttcacaccactcaatcttagaaatgacttcttagagtgtttaaacaaacactggactaccaaattttgtagaccagatgaagaatatatatcacccatattttcctccctttactgaaaggcagttcctagtcacaaagttagtcattatcaagactgaaaagggtagctcctttgttatgtttataaatatgtttatatatctgtgaaagtagatctatccatgaagtggtcatcagaatacttttcagtgagtgaagaatggtgtgattattctgcaatgcatgttgagaaaatacaccttcatcataagaaccaataattctatgccttcatcatatagcattccaacaaagatgacttgcaaagcatataatcataaacaaatatgccaaaggttaaacaatcttgaggaatcaaggcatgtgattacatgccactcacttgataatggagaatatcataattcattccaatagctaatgttccctgaagatatttttgccttgtcaaatagagtgctaatacccttcaaatgtccactctcacacgatttcaaattagaagtatataatgagaactcacacgcacaacacacactcttgtatgcagacgcagctttccatttcaaactcaaaacacgtgcagctagttcttaaggtgccgtctggaaagttctcatcggaaaagaaggagaacaggcttcacctcatctgccacccaacccaaactggaagcacatttaaaaatcagtctcagccacaaacaaggaagtaactccactgccaaagacagtatgcattaatcctcaccttaatacagacagttaggttacagtctttatgagagtaggctccacaatatgatcttgagggaagagcatgactgcaacaaaagcagttctctgggataaaaacctctccaggaggtcaaatttaattgtgtattaggtagagctttgtcacatttcgcaagccatagatttatttaggccttcctttccagcatcacttgtggtttaattcacaagctttattttccaaagcaggcatgtcttatgcagcagaaagagtgacaatgatgcagttattaagcctgcatagaaataaactatacacggtgtgcttgctgcttgcacgtaagagtgtatggctccatcgtcatcattccagacatggcacaggataaatgttgctttccttcctattacttccataaaaaaattatagtttttggttttaaaaataaaagcttttttcttatattatggaaccagaaaatgagactcctggggccacaaatgaaggcattgatggagctggttccttctgaacactccacagaggtctgttctttgtcctttgcagcttctgatggttattgtcacctcttaacctacaatttctttgctcaaatcagccatcactctgctcttcagtcaccagatacttccctctgctctctgagcactctgttgttagtcccacaaaaatacgtccccctcaagattactgatttaattatatttacaaagtcttttccatgtcaggtaacatattcaaaggctatacgacatcacaggggcatactatttccattttataaagggaaaaatgaaagccaaagacagtaaaccactccccctctctcatgaagctagtacatccatcagccaaagcctgtgttactttctctacatcagacagatggttttgtatttgagaatcctttcaaaagttttaaatttaggcttaaaaactggttttgactgaaaaaaaatgctagtgaaggttttatacataattgatgatctcatgtatttcaccaagacatatgaaaacaagcttgagtaatatcagaatatccctgaaaatcatgaacagaaaggagtaaattcatacctctttccacaatgctcagaaatattccatgtctgtttagtgaacttttaagtatgtggatataaagtcatcaactatacacaatttacaaccattttgtgtttgtttgtttgtgtgttttttgtttgtttgtttgtttgtttttcgagacagggtttctgtgtattgctttggagcctgtcctggaactcattctgtagaccatgctggcttgaaactcaaagagatcagcctgcctctgcctcccaagtgctgggattaaaggcatgcaccaccaatacccagcaaccattttcttttttaaactaaatagaaatataaatgttcatattggatctgaattctaggagatgcttcagagaccagaaaacacggcagaagttcgaggacaagaaggtggggtactatgtctatctcttcgtattgactgttgggattcaagcatttcagctaaatccagaggcctggtggatgaagaatactaaagtattctggtattcattctgtaatcattagcataattgttagactgttcactggatatggttatcaggagagacattgcacggtagtagtaccctcttggctgtcactagtgtgaacacagaacagttgaagaaggaacttggcttcaaagttcctccaaggagcctctgttggtaggtgtgttgtaaatttgagtttaatgactatttcttgcctactaatgccattttgtgtgtttctggaggggagtagagagacagggacagagagagggttgcactaaaaggttgcagaggtcaaggagaacttagagagccatagcctctttgtggcggatccctccatcattattaccacgcccaggacatctcccacacaagtcaacagggtcccaatctacgaactgtgaagctggtcagagagaatggatcagatgggccccccacagcatgttcagccactctttccagccaccagggtctctttaacaaactacttcttcaagtgtgctagcctatcatcacagcgataaacacttaaagccctctcgaggccgaactgattcccatctctgcaagatagtatgcaggcaggcacttcagttgtgtctacaaatacacacttggtggagggaaaacaacgtgagaactcttgtttattttgcatgtaactactcaagaacaattcttgtacatttagttaattatgttttagataagtttgcttggcagccttttgtgcaccttcaaagctgtctttgtctgctggtacatgccattgtctttgaaaagctacataaagagttctccaaggttatcaggctcctggtgtcaccagctcacagtcaatgctcacgctagagatattacagaagttcacccctataatctaagtgcctttcttacttatggtgtattatgaaagtaaagaaattgcacaaatgatgataagccaccaggatgcttcagtcttctctatcagtcaggccaatgaagttacttgagctatgtaattcacttccttgaagtgatagcatgtatgaagctgtatttttttaggctaattcattccttcatttgtttcctcctccttctgtgtgaagcagcttctatttcctagtactaaaagagtgaaagcttctggctttcattcgatgatcatgtttgtaaaatgaagtcaggtgcatttcctctctccagaaggacttgtggcaaatggccatttagtatactcttccctctgtgaccattaaaagttaaaagttgtgttttttcagttagaaagatcggctgtggctttactggacacagttaaaaaggagacaattaaaaatataactttcaatgctgtatgttcttactagtttttttttttcattcatttgcttgtttttgatggagtcttatatttcccatgccaaccttgaactcaagtatgtagaaaaaaaaaagaaagaaagaaaagaaaagaaaagaaaatgacttggcatccccaagtgctatgattacaggtatgtccgggctcttgtaaaacattttttaaaaaattatagcatctatggcaaacacagaaatatccttcacaagttgtattctcagagtgaaggctccaatgaaaagcaggttcctgagcgctgacaggaattgcaggatgtcgatgctgggtgtagactagagaaaagcacatggagatctgcagaggcagctgtccctgggaaaggctggcagtaggtggcttaagaggtgttattaaaatgcccctggtagggagtcaatagcaccagacaaagctcaacaggaaggcatggatattcagttggggggggcaggcaattggccccaaagaagagttctttgaaagagctattccttcccctcaagaccccagaagagtaaactgttcttgctccccaaagctgagccaagattgtatatctttctctacctaacttttatttgtcatttcccattttgttgcccacaaagttcacacctccatggagggagagttgctcagacaacacgatccatctgtgatggcagcctgcatttcacactctgcccctgagttctctcagcgggtatgctggtgctgtgtgccctgagccagagtccaagcactgatggttaccagtcctttcatgtccttgagttgtggctgcttctgaagaagctgcttcatcagccttgtcctcttggacaaacaagcttcttgaggatcacagggatttcccctccctcttttgagtatgtgccctatctgccattgtttctatgtcaacccaggaaggtgaatctgcaaacagaaccacagagactcaggcagggtgcctaaactggtggctgaggtggaagcaaaacaagccacccaaggctgcacttaggctacagtctcccatttacccttcaggttacgtcctacaagtctcctgataacccttctgccctacctcatttggctgcaacagaaaggaataccaagttcccaggagccccaatctagcctcccatgggaatccacaagggttatgttcttttttttcccatcatttttaaattttgaattagaaacaagattgttttacatgtcactcccagttcccactccctcccctcctcccacaccacccctcaccaactaaaaccctacctatcatatatccttcctgctccccagggagggttaggccttccataggggtcatcagagtctgtcatattctttgggataggggctaggcccgcccacgtgtgtcttggctcagggaatattcctctatgtgcattgggctcccaaagtccacacctatgctagggataagtactgaactattaaaggaggtcccatagaattccgaggtttcctcattgaaatccacgttcccagggtctggatcagtcccatgctggtatcccagctatcagtctggggaccaagagctccccattgttcaggtcagctgtttctgtgggtttcaccagcctggtctgcacccccttgctaatcactcttctctgaaactgtattccagttcagttcagtgattagctgtgggtatctgcttctacttccacattcattcaaaagaagcacattcatacaacaaggacatctgttcaactatgttcataacagcactatttgtaatagccagaacctggaagcaacctagatgcccctcaactgaagaatggatagagaaaatgtggtacatttacacattcatgaatgtgctgcttaatgaaggctaacggatggcagtcatcaatctcattatcaggggagggaatttaaggtagcctctcctctgttgcttacattgttagttggtgtcttctttgtagatctctagacatttccctagtgcctgatttctctggaaacctgaaatgtcttcttctattatggtatctcctttcttgttttcttcaattcttcccctgactcaacctttctgctccctcatgtcctcctcactactcctcttctccccttctcattcttctagctctttccccctcctctcttgctcgaaatttgctcaggagatcttgtccctttccccttctccaggggaccatgtatgtctctctaacagtcctccttatttactagcttctctggcagtgtggattgtaggctggtaatcctttgctctatgtctaaaatccacatatgagtgagtacataccacatttgtctttttgtgattgggttacctcgctcagaatggtttcttctagttccatccatttgcctgcgaatttcaagattccattggtttttttctgctgagtagtactccattgtgtaaatgtaccacattttctctatccattcttcagttgagggcatctaggttgcttccatgttctggctatcacaaatagtgctgctatgaacctctttgaacaaatgtccttgttgtatgaatgtgcttctttggggtatatgcctaagagtgggattgctgaatcttgtgatagactgattcccaatttcctgaggagtcaccatagtgatttccaaagtggctgtaaaagttggcactcccaccagcagtggaagagtgttctcctttctctacatcctctccagcctaaactatcattggtgttttcaattttagccattctaaaaggagtaagatggtatttcagagtagttttgatttgcatttccctgatggataaggatgttgaacactttcttatgtgtctttcggccattttagattcttctattgagaattgtctatttagttctgtgccccactttttaattagattgttcggtgttttagatactcgattcttgagttctttgtatatttttgatatcagccctctgtcagatgtggggttggtgaatatcttttcccaatctgtgggctgccgttttgtcttactgactgtgtccttagccttacagaagcttctcagtttcaggaggtccgatttatcagttgttgatctcagtatctgtgcttaaggtgtagtgttcgggaagcagcctcctgttccaattaattcaagggtatttgtaggggaagctgtagccacgtctactgtttttggttgggattggaacgaggtgttcaggcttggatacctctgtcagatgactttagggtttagttaaaatagatagttaggatgtgacataagcagattgttgtatcttcttatattttacctttatgattgttcattttggatactttaaactgttaagttttaatcctcttttagactaaaaggggaattgtaggggaagctgtagccacgcctacttaggggctggctacaggtgtacctgaccacgcttgtgagggcatggtcagagtgacgtagtgtgactgcgtttgttctttcggttttattttgcttcttgctatacagactgctgccgcgccggctggctaggtcactctgtaagtaaggcttttccctattaaatacccttatatttctgcctgactccatattggtaatttcccactataggtatttcccactttgtcttctaataggttcagtgtggctggattgatgttgagttctttgatccatttggacttaggttttgtgcatggtggtcgacatggatctatctgtagtcttctacattccagcatcctgttatgtcagcaccatttgttgaagatattttctttattccatcatataaatttaccttctttgtcaaaaatcaagtattcataggtgtgtgggttaatatcaggggttttcaattctattccattgggctacctgtctatttttgtgccaataccaagctattttcagaactatggctctgtaatagagcttgaagtcaggggtggtgatgcctccagaagttcctttattgtacagggttgttttgaccatcctgggtctattgtttttccatataaagttgagtattgttctttcaaggtctgtgaacaattgtgttgggattttgatggggattgcattgaatctgtagattgctttgggcaagactgacatttttactatgttgatactacctatccaagaacatgggagatccttccattttctagtatcttctttaatttctttctttagagactaaaaattcttatggtacaggtctttcacttttttggttagtgttaccccaatatattttatgatgcttgtggcaattgttaagggtgatgtttctctgatttctttttccacgaatgtattatctgtatatagtagggatacatattttattagttaatcttgtattctgccacattgctgaaggtgtttatcagctgtaggagttccctgggagagtttttcggattactaatgtagactatcgtatcatctgcaaatagtgaaagtttgacttcttcctttccaaattgtatcccccttgatctctttctgttgtcttattgctctagcatcaaggacaatattgaagaggtatggagaaagtggacatccttgtcttgttcctgattttagaggaattgcattgagtttctctccaattaattagatgttggctgtcggcttgctgtatactgtttttattatgttaggtatttaggtatgttcctgtgatccctgatctctccaagacctttatcatgaagggatgttggatttttgtcaaaggctttttcaacatttagtgagatgatcatgtgttatttttttccctcaatctgtttatatggtggattacattgatggattttcatatgttgaaccatccttgcatccctgggataaagcctacttgatcatagtggatgattttttctgatgtgttcttggatttgattcacaaatattttgttgagtatttttgcatcgatgttcatgagggatattggtctgtagttctttttcttagttgtgcctttgtgtggcttgggtatcaaggttattgaagcccggtgaaaagagtttggcaatgaccattctgcttctattttgtagaatactttgaggagaattggtgttagctgttccttgaatttctggtagaattctgcactgaaggcttcggttcctgggattttttttggttgggagacttttgatgactgcttctatttcattaagggttataggtctatttaagttgcttatctgttcttgatttaattttggtaagtgaaatctgtccagaaaattgttcatttcctttaaattttcaaattttgaggaatacaggtttttgaagcatgacctgatgattctctggatttcctctgcatctgttcttatgtccccattttcattcttggttttattaatttgcatattcactctctgccatttggtaagtttggataaaggtttgtctatcttgttgatcttttcaaagaaccaactctttgtttcattgattctttgtattgttctcatagtttccactttattgatttcagccctcaatttgattatttcctggcatctattcctccggggtgtattggtttctttgtgttctagagctttcagttgtgttgttaattctctagtgtgattattctcctgtttcttcatgtgctatgaactttcctcttaaaactgctttcaaagtgtcccataagtttgggtatgttgtgacggcattctcattgaattctaggaagactttaatttctttttttatttcttccttgacccaggaattgtgcaattgggtgttacttaatttccatgagtttataggttttctgcaatacctttgttgttgaattctaacttgaaagtatggtggtctgataagatacagggggttattttaattttgtacctgtttaggtttgctatgttgccaagtatgtggtcaattttagagaaggttccatgtggtgctgagaagaaactatgttattttgtgtttgggtggaatgttctaaaaatgtctgttaagcccaattgggccataacttctattagttcctttgtttctttgttaagtttctgtgtggtgttcctgcccagtggagagagtggggtgttgaagtctcccactataagtgtgtgcggttttatgtgtgatttgagttttagtaatgtatcttttacaaacgtggatgccttttggggggcataaatgttcagaattgagacttcatcctgatggatttctcctgtgatgaatatgaagtgacctcctccatctcttttgattgatttttagtttaaagtgcaatttgttggatattaggattgctacccccacttgtttcttggatccatttgattggaaaatcttttcccaacctttaattcttaggtaccatctgtctttgaaattgaggtgtgtttcttgtatgcagcagaaggatggattctgtcttcttatccattctgctgctaacctgtgtctttttatgggcgagttaaggccattaatattgaggagtattagtgaccattgattgttcattcttgtttgttttggatttggtggtggtggtgaaattatgtttgggtttccatcccctttttcttttcggtgttggtaaaatgggattatatattccctatatttttctggttgtagttaacttccttgggttgtagttttccttccagaactttctgtagggctggattagcagatgaatattgtttgaatctcgttttgccatggaatatcttgttttctccatctataatgattgaaagctttgctgggtatagtagtctgggctggcatccatggtctcttagtgtaggtagaatatctatccaggaccttttggctttcagagtttccatggaaaagttaggtataattctgataggtttgcctttatatgttagttgaccttttacctttgctgttcttaatattttctctttattctgtatgtttggtgttttgattattgtgtgtcaaggacaccttttttgtggtccagtctattttgtgttctgtaggcttcttgaactttcattggcatgtctttctttaggttaggaaagttttcttctatgattttgttgaatatgttttctgctcctttgagttgaatttcttcaccttcttctatacctattattcttaggtttggtcttttcacaatatcccatatttcctggatattttgtgttagggacttgttggacttaagattttctttggttgatgagtctatttctcctagtgtatcttcaactcctgagattctctattccatctcttttattctgttggttatgcttgcatctgtagttccttatcctttattcagcttttctatttccagaattccctcagattgtgatttctttcagtttttaggtttgaagtgtttccttgaacgatttgctgatatcttatattttttggtttgtttttttcttccatttcgttaagggattttctcatactctctttgagaccctctatcattttcatgaagatgtttttaaggtcattctcaatctgcttcgtctgaattgtgatgttctgatcttgctggtgtttggtctcttgtctctggtggcgccatattggtttttctgttgttgaattgtttttttaattttttttaattagttcaacttagaaacaagcttgcttcacatgtcaatctctctccctcttcctcccctccccccaacctcccatctaccccaccaccacatccaccctccacttcccagacagggtagggcccttaacggtggctccccaaagtccaccacatgatcctgggcagggcctaggccaagagtgcatcccttcacatgggatgggttctaaagtcccttcttacaccagggaaaaatactaatccactaccaggagccccctagagtgcagaggcctccttattgacatccatgttcaggggtctggatcaatcctgagctggcctcccagacagcagtctggggttcatgtgctcccccttgttcaggccagctgtttctttgggtttcagcagcctggtaccaacgcttttgatcttcatttctccttctctacaactaggttccagagttcagttcagtgtatatctgtgggtgtctgcctctgcttccatcatccactggatgagggctataggatgccataaaaagtagtcatcagtctcattataggggaaaggcatttaggttaccctctccatcattgcctagattgtcagttcatgtcatccttgtagatatctggaaatctccctagtgccagatctctcctcgaacctataatgccttcctctgatctctcatcctgctttcctctattcttcccccaactcaacaattctgctccttcatttccttctctcccctcctcttctcctcctctcattctggcagctccctctcccctaccctcatcctcccaattagctcaagcgatcctgccccttcccattctctggggtccatgcattttttcccttagagtctttcttgttttgtagtttctttggtgaaaaggattgtaggctggtaatattttgctctatgtctaaaatccacatatgagtgagtacataccatgtttgttctttttgtgactcaggtttcttctagttccatccatttgcctgcgaatttcaagattccattgtttttttctgctgaatagtattccattgtctaaatatgccacattttctctatctattattcagttgaggggcgtctaggttgcttccaggttctggctattacaaacaatgctgctgtgaagatggttgaacatgtacttgattatgaacgtgaaatatttgggtatatgcccaagaaaggaattgctggatcttgaggtagactgattcccatttttctgagcaaccgccatactgatttccaaagtgatcttacaagtttgcactcccaccagcagtgggagtgttcctttttctccacatcctctccagcatagattgtcattggtgttttttattttagccattctgacaggtgtgaagtgttatctcagaattgttttgagttgcatttctctgatggccaagaattttgagcactttcttaagtgtctttcagccatttcagatttctctgtttagaattttctatatagttcagcaccccactttgtattttcattgtttggtgtttgggtggctagattattgggttcaatgtatattttggaaatcagccctctgtaagatgtggggttggtgaagatcttttcccattctgtgggctgtctttttgtcttactgtgtcctttgcctttcagaaacttctcagtttcaggaggtcccatttattaatttcagacctcaatgtctgtgctactggcgtaatgttcaggaagaagtctcctgtgccaatttgttcatgggtatctcccactttctcttctagaagattcagtgtggctggatttacgttgagttctttgatccatttgcactgaagttttatgcatggtgacaggtatagatctatctgcaatcttctgcatgtcctaatccagttgtgccagcaccatttgttgaagatgatacctcttttcccttgaatagatttagcatctttgtcagaaaataaggtgtttgtaggggtgtgggttaatatcagggttttcaattcgattcttttcttctatctgtctatttttgtgctaataacaagctgttttcagaactatggctctataatagagcttgaagtcagggatggtgagtcccccagaaaatcctttattgtacagcattgttttggctatcctgggttttttatttttccatataaagttgagtattgctctttcaatgtctgtgaagaactgtgttgggattttgatgggcattgaatctgtagattgcttttggcaggattgccatttttactctgtagattctacctatccaagagaatgggagatctttccattttctggtatcttctttaatttctttctttagagactcaaagttcttactgtacaggtctttcactttttttggttagtgttaccccaatatattttatgatgcttgtggatattgtgaaggatgatgtttctctgatttctttctcattggatttatcatctgtatatagtagggctactgatttttttaattaacattttatcctgctactttgctgaaggtgtttatcagctgtaggagttccctgggagagtttttcgtgtcactaatgtagactatcatatcatctgcagatagtgaaagtttgacttcttcctttccaatttgtatccctttgatctccttttcttgtcttattgctctagttagaactccaagtacaatattgaagaggtatggagagagtggacaaccttgccttgttcctgattttagaggaattgcattgagtttctctccatttattttgatgttggctgtcagcttgctgtatattgtttttattatgttaaggtatgttcctgtgatccctgatctctccaagacctttattgtgaagggatgttgaattttgtcacaggctttttcaacatctagtgagatgatcatgtggttttttttcctcaatctgtttatatggtggattacattgttggattttcatatgttgaaccatccttgcatctctggaatgaagcctacttgatcatagtggatgatttttctgatgtgttcttggatttgattcgcaaatattttgttgagtatttttgtatcgatgttcatgagggatattggtctgtagttctcttttttagttgtatctttgtgtggcttggatatcaaagtgattgtagcctggtaaaaaagagtttggctatgtctcttctgcttctattgtgtggaacattttgaggagtactggtgttagctcttgtttgattttctggtagaattttgcagtgaagccatttggccctgggcattttttcattgggaggcttttgataactgcttctatttcattaggggttataggtcgatttaaactgtttatctgttcttggtttaattttggtaagtgatatctatccagaaagctgtcctttcctttaattttttgggttttatggagtacaggttttcagagaatgacgtgaagattctctggatttcctcagtgtctgttgttataaccccctttttgtttctgattttgttaattagcattctcctcccccccccctctctctctctgcctttttgttagtttggatagaagtttgtctatcttgctgatcttctcaaagaaccaactctttgtttcattgattctttgtaatgttttcctagtttctactttattgatttcagccctcagtttgattattttctgacatctgctcctccatggtgagtttgcttctttttgctctaaagctttcagttgttctgtcaattctctagtgtgacttatctccagtttcttcatgtgggcacttaatgctatgaactttcctcttagcactgctttcagagtgtcccataagtttgggtatgtggtgtctacattctcattaaattctaggaagtctttaatttcctttttatttctttctcaacccatgaatggtgcaactgggtgttattcaatttccacgaacatgtaggttttctgcaatttgtattgctattgaattctaactttaaagcatggtgatctgataagatacagggggttatttcaattcttttgtaactgtggagttttgctttgttgccaactatgtggtcagttttagagaaggttccatgtggcactgagaagaaggtatattcttttgtttttcgaggagtgttctatagatacctgttaaacccagttgggtcataacttctcttagatcctttatttctttgttaagtttctgtctggtggtcctgtctagtggtgaaacaggggtgttggtctcctactatatgtgtgtgtggtttaagtgtggtttgagctttagcaatatttcttttacaaatgtgactgcctttgtatttggggcacagatgttcaggattgagacttcatcttgatggacttttcatgtgatgagtatgaaattcccttcttcatctcttttgaatgattttagtttgaagtctaatttgttagatattaggattgctacactagcttgtttcttgggcccatttgattggaaaatcttttccaaacgctttattctgaggtaatgtctgtctttgaagttgaggtgtgtttcttgtatacagcagaaggatggattctgtcttcgtgtccattctgttatcctgtatctttttatgggcaggttaagacagttgacatttagggatattaatgtccattaattgctggttcttgtttgttttcgatttatttttggtgttatcattatgtgtggattttgccttcctgtttgttttcatgtttggtaaaattggattatctattgcttatgtttttgtgagtgtagttatcttcattgggttggatttttcctttcagaactttttgtactgctggatttgtggatatgtattgtttaaatctatgtttgtcatggaatatcttgttttctccatctatagtgattgaaagttttgttgggtacagtagtctgggttggcttccatgcttccttagtgtttgtaggatatctatccaggaccttctggctttcagagattccattgagaagtcgggtgtgattcttataggtctgcctttatatgttactttgcctttttcgtttgctgctcttaatattttctctttattctgtagatttggtgttttgattattatgtgtcagggggacttctttttgtggtccagtctgtttggtgttctgtaaacttcttgtactttcattggcatatccttctataggttgggtaagttttcttctatgattttgttgaatatgttttctgctcctttgagttggatttcttcaccttcttctatacctatttatagtgggaaattaccaatacagagtcaggtagaaatataaaggtatttaatagggaaaagccttacagagtgacctagccagccggtgaggcagcagcctgtctgcaagccgaaaagagaaaccgaaagcgcaaacgcagtcacactacatcactctgaccacgccctcacaagcgtggtcaggcacacctgtagccagcccctaagtaggcgtggctacagcttcccctacaattccccttttagtctaaaagaggattaaaacttaacagtttaaagtatccaaaatgaacaatcataaaggtaaaatataagaagatacaacaatctgcttatgtcacatcctatctattttaactaaaccctaaagtcatctgaaggaggtgtccaagcctgaatacctccttccaatcccaaccataaacagtaggaagctattcctaactaggtatatacactatcctaagtgacaacaatggggaaagggggcatcgcatcctccgagttacttcctgctgaaatgggacaatgatagtcatgtggggtcctgtaggaagaaaatgttagtatagtgaaagtcttgaatgaattgctgtaagtaaggcttttccctattaaatacccttatatttctacctgactccgtattggtaatttcccactatagctattattcttaggtttggtcttttcacaatatcccatatttcctggatattttgtgttagggacttgttggacttaagattttctttggtcgatgaatgtaaaacctctagcgagtcttcaataattgagattctctcttccatctcttgaattctattggttatacttacatctttagttcctgatcgtttatccagcctttctatttccagcatccccttgttctgtgttttctttatcgtgtctatttcagctttcatgccttgaactgtttcaagtgcttccttcagttgtttggttgtttttcttggctttctttagattctttaagaaatttgtttatttcttgaattttttggtttgtcttttcctccatttcatgtaattttttgcttgttttttcttctatttctttaagggattttcttgttttctctgtaaaggtctctatcatcttcccaagataatttttgaggtccatcgcttcttcatactgtgttgggcttttcagatcttgctggtgtggagtccctagattctggtggtgtcattttggtctttctgatgttgagtgtgttcttattctgtcttcttcctatctcttcttccagtgagtgcaggtggggtctctctttttcctcttgtgaccagatgatgtgtgtgggccaggacttcaatgtccgcagctctggatggtcttgcctctcctggtagtctcctcactcagtaggggttagacctaggtaggggtcaggcctgcagaacgggaaggaagagtgaggtatttccagactcagggagctcctccctggctgggcgggtccactctaagcaggggcaggcccagagagatcagggtgaatggggctttggacaggagttgggcaagagcagaggatcactcacctcggtaagggtcaggcctgcagagcaggaaggaattgctgaatgtgttttttatattgtcttcgtcccatcatttcttccagtggctgtagcaggaatctctggtggatatgggaccaacgttcccttctggtaaatgcaaacagttccaatactctgatgtctgtcctcttctcctggatggaggcaggactattaccagggcgttggctgtctctgggtgtgctggcacccgcagctgagtttggatcctgtgagcagacctctggcatcagttgtccctgactcaggggttatgttctttaccaggacaaacctcatgacacaacaaatgccttcagccatcagccaggtcagccccttcccatgcagacttattctgggaagggactgccttctggaacttccaattccgtgttttctcctggctttctttaaaaaaaaaaaaaaaagccaggctttggtggcgcactcctttagtcccagccctcaggaggcagaggcaggcagatctctgtgagttcaaagccagcctggtctacagagtgagtgccaggataggcttcaaagctacacagagaaaccctgtctcaaaaaaaaagtattttaaataggaagtgttctgacaaaagtaagacaagcctcagtcatgattgcaacaaggcctgcttttgtcagtataaatctggtcaaacatgaagtggacatgacagacattgctgagaaaagcacgctttaattaaaatggattcttttaatctcatgtaggttatgacaatatttttatactattcagtgcaatacctgggggataaaaattgactcacattttgtgaattctgcctacttcatcatgattagagcaatgaaaacatattcaatcctcttccgtaagggccaacagcagccatcacctcatcttcatctcatgtgaccacatccaacattaaactagaagctatgcttcctgtcagcacttcccaggctgcagtattttttataaactacccagatggtcttttaaacctccctgtccttttaaacaagctaaaaatcacaacccttgtctttgtctttctgtcaaggctcacagaggcagatattatcccaatagcatcttctcaaatcgagtgtgcagaatgccctttgttgtattctaagtatctgtcatccaccttcttcccagctgcaggactgtgattctgggaatgcaggctgagccaattttagtctcattcacctcatgtatgatttgaatagatgataaatactagaagtaattcttgaaaaataaaacaatgagggaagtatgctagaggcttgtagacatattttcttacaccagaaaacacaagtgcaggaggagatgactagtgcacctactagggctggccctgaatcctggaagtgctgtccatggcaaccttagggcattgaggttgcctggaaccaagccattcaacatatatagccatgggtgaccagttagcattgaaattattgccacgacacattgaacatctcactgcaaatacttgcattaacatacatgcacatttaatatattattaaaattagcttcaacatgtctctaaattttacaagaagccaatattaaatatttaatttcatacttggttcatcttatatttttccagcatctttgacctagataaaccatattctgcaaattgcagtggtgtcattaactacagacatggagttttcctatcccagaacctcttcctagttggaataggaagtctccctaactaccttaaggcttacttaggattcaaatctttgacctattagttgcagatgtagtcatatagtgcccgattttaaaacgacaagtctcaatgtagtcagtctttcttgttggactttcttggatggtcagctcccaagtaatgacatggaaacttattattaattatgaaagtttgcctttagcttaggtttgttcccaactagtttttataccttaaattaacctgtttctattaaactgccacatggctagttacctttcctccgacttcctcagtatcttgctagtgtctctcgacttggattcttctcccattcttttctctccctggaagtccagcctattctctcctgcctagctattggctattcagctctttatcataccaatcagaaggttcctttcacacagtgtgatcaaatatcccagaacctcccattcctgtgcagacgatataactgaagctgggaaacacaaaacacttgttaagaataataggctcctgaacatgcaacaaacaaaaattaatccaaaataaaatgtgtaataaatttgaatcattttgagagcccctcacctgagttgcatcttgagacttcattgaagccttggttctgaacacaagtgcctgttgcatggtacatgacgtcacacactccatgaaacatcagtattgccaggaacactaggcctcagatttaacactactatatgttctgaattgtgttgttttaactgtatacaaagtgactgctctgatagaaatgtaatgatatagaaaatgaagacttcaaatattttcctaccattgcccatcagtcttttcttttcttttctcttcttttctttttgattggattgttagattgctttattcttaaaattgtgtttcagctgatgatgagttttacacaccaagaaaaacattaaatgaattttgatttaagaaaaagacaaagttctcaacaatttctgaaatcccctcaagcatccaatgtcattgggcaccatgtattgaagtagctttcttagcattgataggactaaaaccaaagtattgatcaactgaaaatgttgaagatgttctatatccttcaatatccaaaatttatccaagataaaaataagcaagcatctcgatcttatttgtgtgcaaatttgtgtttgaataatagtaaaataaatgtatcattaataactgttttgtaataaatttcttgtaatttattatcagcaaccattaatattagacttttctatctgtttggataactgtatatgtacttggggtgcacagttctggtcatagggatatagaatgtggtattttctctcctgggttttggtcttgctttggtccaatcactctttgctatgctcgcagttttcccttcggggataggaaaatacactctgtgtcattttttgttacacagttgccacttgttttctggtgctagaagagctcacagttcagagactgccacaatctcactcagaagaggctttgcacttaatgtttgaacagggctggaaatgttaaagacttcagacactgtggaatttggacaggaggcctgcattatgagatggccctgagcctgggtatacagggtgaaaggtagtggctttgaagtgatcttagagtgtcaagttgacccatagtagacttctgatgattcacattgattgccaacttgacaggatttagagccaccatggaaacaaatctagtatggtatgggggattatccaggttaggttaatttaggtaggaagagcctcccttaaagtgggtggcaccattccatggggttgggtcccagactcaataaagagagagaaagagagagaaagagagagagagagagagagagagagagagagagagagagagagagagagagagaaccagatacatataagcaggcattgctcttaactgtatttgaaatgtgaccacctagtgccccaagctcctgactccatggcttccctgccaaccagaataaactttctcttccttaaattgtttttgtccggcttttttgtgacagcaacaagacaaataaagcttcctctacacacacacacacacacacacacacacagagagagagagagagagagagagagagagagagagagacagacagagagacagagagagagagagagagaagagagagagagagagagagagagagagagagacggggagtcatgaaagtaaaaaacaaaactctctagaataagggagacaacaaaaagaagggcactaaaagaattagcagtgttgcgggtgaacctataatgatgaccacacccctctgggcgtggcttcaggctgatggaagtggaaagagggaagcttgaggtgcggcttctttttgcatggtcttttctcttgggtcatcccatccaataggaagggcagagaagtgctcccacagttctttatatttttctgtgtaagtgttccccaatgataaacacccatttatcatttatcttgggtctagtgaaatcattacacccacgccttcaggagtatggtgagaatgagggggaatgtacacattatacaacagatacacttgtgaaagcttgaaaatcagtgaatgagatttcaaaatgattttgttgtaaagtaacatgctgtggatccaaggttaagagttgttttattatcactttgtatccaatctcactttattctgaatattcttctttgcctgtctcgagtgtaacgaagccccagaatttagtaggcccccaaaccttagctcaactgactccatgataaaaataccattcaggcctaaaactcagcatgtagcaggaccacctgccaaaatgaaaacaaagacctaatccattgaagcctatagttctgggaaagtctctaaatatattagtgttgcttttttggcttctatagttctgcttctggctagctgttcatgttaactgaagtcaacccaggatgtgttttctgtgattagaatttaagctcactctgtagagcaggctggcttccaactcacagagatctgcctgcctctgcctcccaagtgctgggattaaagatttgtgccaccaacaatccaaagttacacaaagaaaccctgtctcgaataaccaaaaaaagaaaaagaaaaagaaaaagaaagtttaagctcaccccgaggaaggcttggtgctaccctgggatcctaaacactcagtatggtctccgggctgtctgataaagactttctattgatttaaaacaatgtctgagcagtcttctgtagttaatgccccacagtagtgggagtgcctgggtcttgcaagactggattagttaccataaagatagattctgtcaacagataggtacttcctttcatctcatgcttactcctttctctgcttctctatctactagctatcatagcagaagtggatactcaccaggagctcaccatgtgtgactgcctgctcatagataaaaccataaactaaaacatcctcattttcttaatgacttaccttgctctgatactttattgaagcatgatgctgtagcctgaacgaaggctctaaatcagtaattacaatgcaaatctagctcacagattgctttgttgagataactcttactggaacacagcctactcaactgttacatgctgcctactgttactaacagagatcagtagttaaaatttggccttaaaattttaattaatgactatgtgatcctttataaacaaatttgttgacacttgttctaaagcaataaaactcatttcgttcattaattgatctgttgagttttaatgaaattccaaaatagacattccaaaaaggttttagagtgccactgtggagcaaattttatgtgtagtagaaccacttatagaaatcactcgtagaatgactcaaagaaacaattctcagatttaaagaaaatatttcatgagtttggctacaaattagtcatgtcttaactctttaaagaaaactcatgctcaacttatggctggcatggggccatggtgagaaatctgtaatccacactacatcactattaaccaggaaaagaaacttaacacaagagattcactcaacctctaaagatgggtaaaactttaagacattaaagtttcaaatggttaaaaaaaaaaaaaagtaggaacacatttcgagcagttaggaaaccatttggcagctcctggtcagcttgaggcagtgcatatctcacagctcagcacttccctatccaggtgtgtaagagcttaaagagacagatcaaagatcacccattcatagagaagaatggagacagctatcaacagcaggagtctagatcatagaagagaggacagttcgtattggtaaacattcataacagttaaatgaattatccatgtctatatagagaaacctaaaaaacatgatgatgaatttaaaagcacctgtggggacaactaaatggcttttagtggtaaaggtgcttgctgccaagactgaggacctgagttaaatctttgggacccacatggtggaaggtgaggactagctcccacaatctgttctttgatctccacatgcatgctataaaggcagaaacaggtatatctttgtgagttctaggccagtgtggtcaacagagtgaattccaggactgactgatctaagtagtgagttccaggccaatgaaaggtacaaagtgagacattgtgtgctaaatgcaaaataaaataatgataatgcaattgcaaacagaatacagtctcatcattgacatgccttttaaaacagtcagaatcctactttataagcacattaataaagtaaaattataaaaatctgaatttaaagtaaaactaaaggttgaaaaaaatcagactatctttggattataattacctctcagaaggaaaggataaggaatagacaacacaagacatcttagctataatctcatatgtgcatgtgtatgtgtgtgcattattacacacatgcactaatagtgtacatattacgtcatagtatgtaacacaaataaagtgatgtgtccctctcttttgcctctgcgttaggttctctgctgtctgcacactacaagagagaggcagagtgcagcatgtgccactcagaggacccattcagggctgagatctctaaagaatcggcttctaatgacttatattgccactttaagatttctgctgaaagagaagtgacctgtgggcctcaaataggtgttttgctctttactcaccaggaaattactggttctacaagttacaacttccacatattaaggtattgccctacaattaagcattcatcccctttctcctcacactattttccttccattgggtttgaaaatggatagaagcaacagagacaatgactctatagcccatttatgcccctgcctaagtctatatgcttccaggtaaatttctacagcagagtcacttccccatgtcatgtaggtgaaagcaggtttatctcccttctctattttgccttcagctacacttttctcttctcactgcccattcagtcaaaatcacttagtcactggtattaacacacactcgatgtctgcctataattctagactgtataggctcacagagtttggctttctactggaccacagtagtctgcattgaggcaagctctatgtgaaaaattaaagtctacttttggaatggttggcttggagaagcaatctctcctgtccttgagaggcctacctcgttttgactctgtggacatggacaacattgttaacttgtaagtttgttcccttaacaaaaaccagaacccaatcattgtagccacagggtgaggtgtggtggctattgctgtatgagaatgagaatagtgacttggagatactgggtagaatggagcaaccaagaaataggagggatgaggagaaagccttgaagctagagttcataaggtagtgtgacatagtatactgtgctccacaggaaatgagtgttgtcctcagaagcctgcagtctcagagggtgggcaaagcatttggctgttaatgaatagagagaagactcaatgattaagagcacttgctgcttacagagggcccaagttttgttcccgaacccacttggccactcacaactaactgcctataactccagttccagagtacctgataccctcctctagaggcatcaggcactcaagggtacacatatatgcacacagacaaacagccatatacataaatgtaaatcttaaaaataaacaatatattttttttaatgaatgaatgattcagtatttactctccttgaaatttcctgaagctaaaactttggtctagaccaaaacctacactcagatatttgcaaaactgccaaactggttttcagtagatgacaacagcagggtatctagattcaatactaagaagcaatgaactttcatgagaaggcacgatgacactcagtaagttactaagggaaagaaggcaatctaaaaaaaatttttttcgaaaaagtcccacccttgatgactgaatctctaaggcattctatagaagaccaaatattggagaattcaagagggggaagggtaggggctgggaaaatttatactctgtgctcaaaaccactctaaaatgaaatctaccccaaagcttgcaaacgggaataacagaaataatccaaggcaatcttaaagaaatgggccaaaccaaagagctgaaggagaggggcaggggatagggccacacacaggaaagcactccctcttgctggagtgcagaagtgccagggatacaggagcctaagaccaatccaggaggtctacccagaaaccctcccatcaaaacactgcagggaggaggtagagtgatccaaactgtttgtgctaaaaagagcagtaaacactcatctcaataaaacgccttaaatacaaaaacatttattatgcccagtctggcttctcttgcttatttttttttcttctttttgttaactgctcaatgcagaggacaatttacttctccatttaaaaaaaaaaaaaaagagctaaccccccattctgttttggtttgtgaggttttgttgtcatttcttcctaaagcgctgtttcctcacatttgcatcatgtgagatcccgtttaaactgccttttaattgtatgtgctgccttggcagagcatgactgatgtactcgcgttaattagggctccagtcagcagcctgtgccagctggaaactgagaaacaagcgtaaattattctgtcatcaatcagctcggaaatgtttgaatcactaattagtttgcaatttgggtgacagtttatctgacgcaggcgatgtcagaaacttcagatctgagatgaataatttgccaggaacaagcccagattccctgcttttaaatacatgaaggtttatctgcatgttgaaaggtggctcagcggtcttcattaacttccaactgggactatggaaatcaggatccagcacgagccacttcaggccatggtagcttagcagatatttagaaaaagaaagcctctttttcttctgctgcttcttcttcttcttctccttcttcttttttattaataattcataaactgatagacaatgatgtttgggttttaacagctttaaaacacacaatggcttccttaaaaaaaaaaaaaaaaaaaaaagcaatcattctccttttacatgaaaattagcctcactgcatcttgctgtttaactgatttattctcctctgctgtcacatgaccagaatgttaaatgggggaagtgattattaggccttgtcctttcaagaagcgttgttattagggctttattaaatggcagacttacatttctgactaaatggaaaggtatacagacagtgtgggggacaggatagtaaaaatagaaaaacaattttttgtctaaaatcatcaaatatctgttattttctccaactcaggatgctagaatgggcctcaggtattggaatcaaagaacaggactaaataataagccccatgtcctatgtacatgggagggactgttatccatggaatctttagattcctgaacattttaaatctgtggcttaactcagtattcataggtcacacactgctctatacacaaaacttcggatgaaaggagttaggagtcgtcacctttcaaatcttctctctacaagttgtcaattgaatctaccctcttaatgatagtaggcttccaagactgggtgctgcaggaccaatgctgtgtgtttttggatggagagagaggatagaagaggacaggcaagtttagaataggccctgctcctctcagaatcaatcaggtgatgcttttgtcagaatttgaggaaaggggcgctatagggtcatagggactgtcattagaaggcatatgcttgttggagtaggtgtggcttttttggaggaagtgtgtcactagaggtgggctttgaggtcacatatgctcaagccaggcacagtgtgacaattctcttcctgctgcctgctgatttgggtgtagaactctcagctccttctccaataccatatctgcttgcatgccaccatgcttcccaccatggagataatggactaaagctctgaaactggaagccagccctaattgaatgtgttcctttatcagagttgtcttggtgcctcttacagcaataaaacctcagctaaggtagctgtctatggggaaagaggggaattcaggacaattgaattcagtgtcaaatgaagactgggactgctggcaggtgggatgcacagcctgatgcttgggaaggcctctatgaccagtgtgggtgatgctctctcaaagagaagccctcggtttacttttcaaagagtttcttgacaatccccagctccaaagccatgctctcaggctacatttcctcacaccatttgagctcaccatgtaaattcccactaagatttgaatggagtttgttcccttcaaaacttcaaaatgaaacttaatcgtcattacagtgatgtcagaacaaaagcacaggctcacacacactgtaggtagagagcgctgatggtaaaaagtagagaaagaaaattcaatcaatatggcacattgggcagaggaacaggatgacacagtggaccccaagtacatcttctaggcactgacatgagctgtccacatgaggtagaaagtggtcttggggtcttgctcatggtgtgatctggagggccctttcctcaggttctgatttgattcagcatgcatactcacaatttacaactgcctcaaattctacgaataagaatgcttctagtacttctgattggaaattgtgaaataggacagaccagggaaagattttctccatgttttaaggtaggaaagatatttgtgctagctaatttttatgtcaacttgacacaagctagagtcatacaaaaggagagaacctcaactgagaaaatgcctgcgtaagatcaggctgcagccaagactacagggcattttcttaattagtgattgatggggaagggctcagaaaagtgtgagtggggccactcctgggtaggtgattctaggctttagacgatatcaggctaagcaagtcatagggatcaagcaaataagaagcactcatccagggtctctccatcatctccagccttggttgcattcctgctctgactgcctttccttatgaacagtgatgtggaagtacaaaaagagtaaaccctttctttggcaagttgcttctggtgatggtatcttatcatcctaagacaggggtggatgtggtaccacacaaagctgcatagaaaacaggttctataggcgccagcatattgtacacatagcttctgaagtcactccagagaagaggaataggaacgagcatttgagacagctgacaaggaagggatgagaaggatatgcaaggaagattttctgagtcacactggcaagtggtgcaaaccataaataaacttgctaagtaaacaaaatagaggttcatcaaagtgaaagacaagactagtttatttcaaactcctcctttttcggtgtttccagggaaaaattcaaagtagccgcttatgaaaacattgaaaattatatttctggaatcgttagaaaacaaaatgaaagatgacacactgtttactacttccaacaacagccaacacagttttgaatcttattttttcaaatcatttcaacttcagattttcactgcattttgttttgctttgctacatgcctaactcaaaaaccagaaagtgtgtacaacaagatgaagtagggaaggaagactgagactaatcctctctgccacattttcctctttggcccttgatataaaactttgagacaatcccaacatatcctagatgattcattgggacccaccgatgataaaatgtaaagaaagatgcattgcaaagaaccaggacacattgtttagggtagatatctacagattagaaataaaagcaacttttgataccagccacttcacagaatgtgtttagaattcccatagctttgggggctatatctaaaattaggaaaacattatctaccctagtttcattcattatagctgttcctttttttataataaagataaccacaggactgcatacagcattagaacatggctgtcctatcttaagacctatgtggagagaaccctgaaactctgcctgcagtccttcactcatcacagaccccaagcagccttcttgaaaggagaagctgactccttccagtgcttctcttcatgtggtcatacctagttctgttctgaacttgctatcttaaattttttggagtgtgagctgctatctggtatttgctttgcactggctaggtgtttgccttggcctctgtgactgcagatcagatcctatttcatctcccttcctatggaattcttccttagccgtcttcacatttatagtcttcattaatggatgcccttcaccctccaggtagagctgtcattctacttatcacacaattatatggtttcttcaactctaacctctttgggaccaagtttttttcgccatctcgtgctcacctctagttctcttgttctctccctcccctaccccagcactgatcatttattaataatattggaaagtatgtctacttgtccttcgctatcattagttacttttctagtttcacacctgccttcagattcctgtctagggtattcacacatagacccaccaattagagcccccaggtttctgaaattttcctaatcgagatggtccgtaactaacttggctgtcaggtaccattttgacatgaaattctagtcagtttatgctagttgatgctgcagacaagccccagatttcaacagcctactacaacaaatatcaatcccccaattcctcacattgtgtgctggttgcaacgccacttcctgccctctttctttgggaataaagtctgaagaaaaagccactattaagacatgtcaatctcaaagccaggaaaacaagaggtggcacagccagtgacagcccttagcgtctgctctcagaaatgtcacatgtcacttccactcacataccattggcaaaaacaagtcacaatgccaagtcacacatcaatggagcagaaactataatccttccatgaagacaagtctgtagagaagggcttatatctttcaacagaaataaaacctaccagaaccttcacaaaatgtctccgagggcttcctgcactgctgggaatagccacttagaattagagacgtcttcattcactccaaatgacacacctcttttggtctctgtggattagctaactggtttttctacatctgttataaatatctgactcctcagctgaaagtgtttaatttccaaatagttattttgatcctgccaataaagctactttcaaaccagacccatttaaaaaaaaaaagaaccatgaagtaaagaggagttgggaagggccccaagcctgcagcataagttgagagctttggcccagatgtctgaacaagacccaagaaagaagaaagtgaggcttatacctccttgctaacccctgcaggtctgtcttgtagggatccagtctcattgcaattttttatgggctttgatttgcaaggccccagtcaagagatcattagatttctctctgctcagtgtcataaccaaaacatgggcatactgccatcaagtacatgatggtgaacaaaccacagccaccagacaaataaatcaagtttcacatcatcatgattaacaacatcagacataatgtcacaggcttttcaaactcgctactatttaaaaaagaatagatattaaaagagctagtgctgagattattgacttactatattacctttcatgaaaaatatttgagccaaatctaaataaacacagataccaacttggtcttaagtagtgatatttacatttttatgtcatatggaacacttaaaagaatgtttaactacttctcatactatattacaaagctgatctaggcttgaatggttcccaacactgacgggaactttaacacatgttgaagtttttgagacagtgatcgatcattcattcattaaagtaactcagagaagggctcagacaatttataattctattatcaccattcctcccacatacattcatgactgacattaaccaatccccacagtttttttctttgcaactctaaaaccacctattgaatcctactccacacaatgcttctagcagcaaaaaaaaaaaaaaaaaaaggaccatgctgaaggtagagcctgcttgacatcttgggaacagtggcaagtggaaagcttttgcttcctaagacactcgctagtcattaaacactccctcacctatagctgaagaggcttcactggcccattttaatctcctttggctattagtccaacattttccactaatatagtctgggaatataattttgatataggaagtttaatttaatgaaggaatttctcttccactcttcactcattgatgcctaaggattgtgtccacagttggattgtgaatacttaaacctactcagaaacttgattcaacaatgataacccctgcagcagaaacccattacacatgaatgccttttcaagcttcaaaagtaaaactgaaacaatattttattaaatgaatggagcattatacaagcaattgtaattcaatggtatttgaaagtagtaaggttgttgtgacaagataccacaaactagggggatcccaaaaagaggaatttgtctttcaactcctgagggaaaagtcaggtgtactggaccatacgactctggaacctgaaggggggagactccttcaaggacatcctggccccgggggttcctgagtattgtggtacttccatctctgtcatctccatcactgggtgtttcctttcatgtatctgaatcttttagtctcatctcttctagccacattggatcaggattcatactaataaattaatttttctttggttataagcaacatggatcaagacttccatctatggggatgatgggaggggtacaactgaactcactgctaaataacaccaatcagatgcattactaattgcccaatttagcatacatgagttggtgactagctgctgtgcctagctcagatagttcactcccttgcatgggcatgtcattctcaaacatttgtttcaaagttaggcacagtatcccaagtgacaataagcttattggtatttttcccataagcaactgtcttagggtttctattgctgtaaagagacaccatcccatggcaactcttttttttaaatttatttttatttaaattagaaacaagcctgtttcacgtgtcaaccccagttccctctccttcccctcctccccctaccaacccttcaccctatccccctctgctacccagggagagtgaggccctctgtggaggattgccaaagtctgtcatctcatccagggcagggcctaggccctcccccatgtgaccaggctgagagaacatcccctgcattgaatgagctcccaaagtccattcatatgccatggataaatactcatctactaccagaggtcccacaaattgtcaaggcctccccactgacatccacattcttggagggatgtctggatcagtcccatggcaactcttataaaggaaaacacttaattggggctgccctacagttcagaggttgtctcttatcatcatggcaggaagcatggcagtacacaggcagacatggtggtggagaaggagctgagagttctacatttggatctgcaggtaacaggacataaactgggtgtgacttgagcatgtatgagacctcaaagctcaccttcacagtgacatacttcctccaacaaggccacattactctaacaaggccacacctctaccacagcaactttgtccttaaagaccagttatgaatctagcagctggtgttggtaagttccacttcctcttctttgaacaatgtcataatttttatggtgtccttggcaaaatgtaatgaatctagatagaagtacaagtgctgttttatttgcctaattattacataccatgtctaatgctgttatttgatcttttaatcaaaaaagcatgaatttcaattatggaaatgcataaaaatagtattaaagtccatcatatccaccctctcaatgaatattttgatataacttcttacaacctgcattcacagacttttaataaatatgaacgcactactacacacacacatactttatgagtggttaaaattggtggttgaattgtgatgaaaagataaaggccacttgggagacaaaggacatactattcattatctttaatccttaaatattataatatatgagttaacagcttttgtaggaatcccaggatctctagttcatagtatgtcttggttatttttccattgctatgaagagaatccataatcaaggcaatctgtagaagaaaatgtttacagggggcttatagtttcagagggttagcatctatagctatcatgtcaagtagcatggcagcaggcaagcaagcatggcacttgaacaatagctgagagttcatctgatccacaaaggcaggaagagagagagagagagagagagagagagagagagagagagactaattaggaatggcatatgctcatgaaaacctcaaagcctgacccccaatgacactcctcttccatcaaggcaataccttctaatccttcccaaatagttccaccaactggggaccaaacattcaaatatatgaacatatggggaacattttcatttaaaccaccgtatagtagattactaggacattagataggcctacatggtggccatctaaataatacccaccttttatttcccttgggttccaacctcatttgatggaaacacatttgcatgtggctataacatacacctaaataatcaaccacatagaatcaaaaaattaaataacagtcaatattgttgactctgttcttatccttttttaatgtggcatatatttattagaactaatgaaatacatgatgaaaatatcagaagatatctttgggttctgagtggtgaagttttcattttttgtcattctcagcagtgtcaacatttataagctgatggttcagcaaactctgacctctatattgtcctgaattccagtcactgaggcactcagattagtcattagtcaacactagaatccattagcaactcaaacttctctatactccttaactgttcatgctctcatatttaaagaaatgacctctttatgtaaaggactccatcttgatcttatatgtctttatcttctcagactgcaataacaaaacactaatgagtgggtgaattaatgagcagaaattagcttccaatgagtatggaggctggagagttcaaaattgaggcactggccaattccgtttctaacaagtggtctctccctcacttgcaggtggctacccactgacagctctcacaaaatgtgaagataatcctggcctcccttcctcttctggtatcagttctatctgattagaccccccgaagtgggataatcatactgactttcttatagattccatttccaaacacagtcaagcacactgagggctagtggattaatatttaattttggggtataggattcatagttcagtcaataatgttgtgtttctattcagtcaatctttagtcctgaatcaaataccttccatattcttgctattgagcataaatcctatgctaacttcagccaactattcctgttcaaggactccaaaaaattttcagttccttcattctttcaaccctcaatccttaccaaaatcctcaagacataaactcatcagcatagataccaacatttctatgatcatgcagatttgagatacatagcacagcacctgtaagctccaggtctactgtgcaatgaaacaaaatgaaaatttggaaggcacatcacagtctcaactgatgaggtcactctatgagcttcataatttacagttgggatgacacagaagcataatgaggttttcaaaagttggcttgggtgacattatcttgctcatattggatattcctcactgtcataaggccttttaaatccttatgcccagtctttccagagatttagtataagtcttccctttccagacaataatagacttctcctacctattaatatctagctccattgtggtttgttctctggaagctaggtcagtttgctcacatatttacaagtcctaactccccattctactgcaggttacatatttttataattaacctcaaattatggcactgatgaagacaatattcactactgtgaaagagcataaggagctgttttagacatttggtaccctcttgccatgacaataaaggcaatcatcattatagctcaatcttctgtgaacagccctgaaatagcaaatcccacaactactaactcaaagcaaagcaagatgcttgagtaatatcaagttgatgaagtctctgacttgggtgggctgcgatcagtgagaagcaagtattcaaactggaatttatcttttgaaatcagtcagcacattctaggcacaaaaagagatctgcaacgtgatgggcaccacatcattttaaaaacaagaagatctacctaacgtaaaagtccttacccaaaatagagaaggaggagaggatagtgtacactatcactatatggcagatgctgtgttagaaaccgttattcacaagaaagataatatttatagggctttattatgtgccaggtgttattctaagcatttcacattcgataactcatttaacaaccctgtggagtgtgtaccagtatgaactttattttacagaatccaacacagaactatctggctgtcaagtatgcaacacagattatgtgcagctttctcgttccctctagcaatctgtaaggtgagtgttatctcttcattttgcaggaggcaatggaaccatattaaaatgatgtaattagaggcaataaaggctctatagatttgggtcaaggtctttcttactctaaggtctcttcacatcacctgctgctgtctgatattcagaaggcataggctctctgtagttcagaagtggcagctgacaactgaatggactcctgtcaacagactcaaatggatggatgagttcaggtgtcttggcagatcttccctgtgcattatggtctcagcaagaagagctataaaacagggataaaatgaaaggactataagtactaaagggccataaaatctcttcggatttggtttccaacaaatcaaaggcaggggaaacctccctgtggttttctgagctcttcagaggaggagtgagcctaagttttttctcaatgctcagcactttgcaacacaaagctcagctcccgatttcaggatgctgctagtgtttccaaagctggcccaagccgctgttaagagctcttgactaccatctgatagtgaaggttctcccctgatatttgaggagagaatgctgaacctctactctatccagcatcacagaaggaggttctgacaccaaggggtcctcatgtactgtggtcaggaacagaaaaagaaagaatgttgcagtgatgtgaacaggaaatagaaactggtgaagcagtttggagacagggacctagattcttggctctgccttgcaatctccgtggttttgccctggccacagccagaaatgccaaaaggggtctagtttcttgttctctttctttctcttttaccaaactgcagtgagccccactgctatacttgaggatatgcccaaaactgagaggcacctgacaccttgtggacggaccaactaaactgactacctcatctccccatgcctcagcccagtttctgtcataaacggcaccaatccccttagactagctactcaatggaacccggtcttctgggacctgctcccactacacaggaactctactttctttctttctcataagctcccacttgttgtcctataataaaattccctttctaaattcagtctcgatctgtgaaattcattctttgggttcacaaagcaaatgacctacaaacttctgggttggggtagctctagtggctgttgatttgtccagcaccttaactctccagagttgcacacctgtggcaacaagccttgttaccatacccattttagcaacagagaataccaaaatgagtaggacagaaatgtgaaagcaacacaacgctgaacacacagatggccacttgacaacctgggcgaagctttgactctgtgtaaatgttttgattcacttacttctttcaagacaatatttgcttagaattaaaggtatttttaacacatagtagggactcagtcaattactactgaaaggacatattagcacagttataaaagggggtaatatcattgctaacatgaaaagaagagacaataaaatgctttaacattcatgttttttctttgtaagttaaggaaagcatcttttaaaatattcatttcctttcaccactgcttttgttgcatctcttcccttatgaataatgataacacgttatgcaaaactacacgttgttaaatatactttattaaggctgtgactgcggagttcttggagattttcttttcccctagatgaaaatgctcattttcatgaaataagaagtcagtcaagaataggggccatgaagtgttctgtctgccctcttcacgctgcaccacaactggtattaacaggatcttcagtaacattgcttgctgtctgttcaattcaggttgggtatcctaaggaaaccttaactcccaggctgagctaaatcacacctctatgagtagaagcacacttaaatactattgtacttcagaggaacaaaaagagcaggagtcctggggaagaagaacattgcatgagatctgtcataaggaacagtaaaattaaaacagaaacaacagctgtgaagtgggggcagaaggagccctgggaacagcaaggacagcacgttttacccactccaggctactgggtgtcttcagccagtcgctggagcagactacagtcaagttcactggctagtacagggaaagaattgagaatccaattcactttgaagcatataaagcaatatctgaaaacaaattaagaaggcctccaattggactggttgagagtcattcagacaatataagcaatggctctggaaagattcctcaggatgagaagggataagcagagctgggggatgccagtggggagcagaatagccaagaagcccaaaatgatcgtattcatcatcaagagaaaaggtcatcaaggccagctgcttcctgaaaaggaggcaagagtctagggcaggtgtgagggagcagataatggaaataacaaaaggctcagtattcattcaagatcaatttatttgtgcattttaattagcatacaaaataataggctttggtgtgtgatattttaaaaatatgctttgttttagccgtgtcctccttcactgtcctctattgctctcctaccaccagcttgtagcctgccactctcagaagaccatttccagtctccttttatatgtgttccattatcctcatccattcctttaaacttcccctttcctagtttcatgactattctcgtatgcacaatatgtacccatatatatataaatcaaaatctatgatctgcttatgagagagaacatgaggtatttgtctttctgaatctgggtcacctcacaatataatcattttccagatccatctactttcttgaaaatgtcatgatttcattttcctttgtggctgagtagaccacgttttcattatgcattcatctgtgatggacatctaggttgttccatcttcttgctgccgtgaatagtacagctatacacaggctgtacagtcctctctctgtggtcagacttagagtccttcagatctatgcccaggagtagtatagctggatcatatagtaattctaattttagttttcaggaaatttccatactaatttctgccatgactgcaccagtttacaatcccaccaacaatgagtaagtgttttttattttatttttttttaagtctgtatcctaaccagcatttgttgtcatttgttttcttgctgggagccattctgactactgactagaccagaatggaatcttactatagttttgattttcatttccctaattgctaagaagttgaatacttttaaaaatatttactgaccatttgtagctcttcttttgagaactatctgttcagattagttcattaattgattggcagattttggtttgggggtggttctttgttttgctactggtacttagtttttgcaattctttatatgtcctagatattaatcccccatctgaaatatgctcaacaaagacttttctcccattctgattctgtcttttcaccctgctaatggtttcctttgctgaacagaagccttttaacttcatgtcctgctatttgtcattcctttgggttatctcttatgctattagagtccttttcagaaagttcttggctatgcctatatcacaaagtgttttcctacagtagtttcacttattcagggttttttatcattttttatttgaataaaaacaagattgatttacatgacaatcccagttcccttctccctcccgtcctcccctaccaccacccctgcaactaaaaccctacctatcacatacccttccttctattcttcacctgactcaacctttctgctccctaatgacctccgcatccttactcttttattcaggttttaaattaagatgttttatccattttgaattgattcaattgcaataagagagatgtggatctgttttcttcctctgcatgtgagtatacaactttgcagcaccatttactggatagactctttcatccaatgtttggtttgttcttggtcaaaagccaagtgactctagaagtgtggatttatttctgagattctatattttgtttcaaaggtctccatctctgtttttgtgtcacttaaatatcttgacactatggctgtgtagtataatttgagatcagatatttggatgcctcccggagtgttgagtagcttttccttgggagacataagcaaacatctatccatcccagataacacaccgatgatggaccaaagtaaagattcctccatggcccaaattgatgaaccaatgagtttatttgggtgacttacagaagcatggattacctgaagaccactgaaactagaaagcccacctcagcgttggtagtaactcatgaaagctgcatccctggcactccttgcatgacttgccaattcgagcatgtcctctccacagaaactgcataatcttggagagagaccttgtgaatcttgtaagattcctatttcctgtacttgtatgatttgcttacttcctgagccctccttttccctcctcctttcagaagagaatgtttaaatttggaggaaattgccacacaattggattgttttggctacccatgactttttgtttgtttgcatgtgaattttagaattatattttctacttctttagagagtggcattgaattttgacagagatttattgaatctgtggattacttttaaaaatttcatcaatgttgtattaatgaacatctatttctgccaacagacgtgtgaatatgaatgcagtgtctgggcatgtgctgaagttccacttgtgaaaaaagcatagaggtcatcttaatgtattgtgcttttatgtgcaaagatgaggaaaacaaacaaaccataacatggtctagtcagtgtctttgtgcgtatgtatacctttgccaagtttcccaggtaattctccctcctcgtattctagccatttttaataccaccatcctatagttttagggcacctaatcaaattatatattgccaaacatgaaaaccaaagaaactaaaataaaggacaaaacccaacagtgctggggatccagcctttgtgtattaatttactgtgaacatgtatgccagcattcccaaaaacctacttcctagaagaaaagcctcagtgtcctgtttgtcagacaatgctgtagcatccagagcagctagagttacagatacagaatggacagtgttgcatggtcaaaagcttgataaacacacaagaagatccgctcaccgattttaagaattgcagagcattttcacaagaagaagaaatcactaaactcaagtttcaggatagtgaaggggtttctcaagtaaaggtatgtgaaatcaactgttagaaagtaaaagaatttcagagcttggggcaagtgggcagatagtgcagagcaatagaaatcggccactgttagcagaaatagtcaggaatgtagcttagaccaaataaagatctttcaggatgtttcacctagttttatcccaacccagtctttttcagctcagggacacagaaggtagaaatcctattctctgctgtattaatgcatatgagtttaagagatgcacagtctttgctgccaacttgactagagttgtaatcatttaggagttgcatctgtagccatgtttgtgaaggtatttccaaagaaatttaactacagggagaaaaagtaccttgcatgcatgtggcatgatcccatggactggttatgaaagagaaatcaaactgagcaccaatacctagttctgcttcccagatgccaaccacctcatccttcagctgccacagctagctagagcaaatctcattgctatgtcttccccaacatgatgaaccctaccctgaaactgcaaacaaaaataagtcctttctctttcctttggtggttttctgcaggtattttatcatagcaaaggaaaaaacagcagttgatacagtaacaaataattgatttatattttgactgtttcttcccagctgaatgggggtgcttcctcaaactgtctggacttcaatttccctctaatgcaatgggaagtattttctttcattgtgtgctttgttgtaattaagatgattccttacacagaaaggaaaactgtctatttagaaatgaaagtttagtccatggaaaatcattttcttcaagtttcctattagcttactaaaattcttaatgttgtcggtaaagcagggcagtggatcaagataacctggatgtggaagacaatctcactcctaatgtgccattcagagttggtgctcagtcccagagcaaagtgttctctgctgtttgaacaagagcagtgacactgatcccaccaccaggcatgttgcaatgtctaatccataaacaattctcagttgggggaagaatagaggagagcaggaaaagagataccttaatagagggagccattatcggtttaaagagaaatctggcactagggaaatgtccagagatctacaaggatgatcccaactaagaatttaggcaatagtagtgaggctaccttaaatgcccttctgctataatgaaattgatgactaccttatataccattctaggaccttcatccaatagctgatggaagaagcagaaacagagacccacaactaagcactgagctgaattcctgaaatccagttgtagaggaggagtagtgatgagcaaagggggcaagaccaggctggggaaacccacagaaacagactgacagctcagaaaccagcatagaatggaactaggcctcctgaatgtgggtgtaaattaggaggcctgggtagtctattgggcctctggtagtggaatagtatttatctctggtatactaatggacaatgggggcccattccccagagagggaaactctctcagcctagacacatggagaagggcctaggccctgccccaaaatgatatgacagattttgatgatccccctggaaggcctcaccttttccatggagcagaagcaggatgggatgggggtcggtggggagcatgggagaatgggagggagggggaactgggatttatagataaaataagattgtttctaatttaaaattttaaaagttaaaaaaattaaacttaaaaaagaattctcagagaaaggcagactgtaaatatacattaccacgttcatgtcattcatctttcttttctattttagctacttgatgccccttaactcaaaatcgtggcattttctcactctatctgcctcatctttcaagaggggccatgctcttctgcttctctatttctgggggtctgtgctaaaaatttcattccgtctcctgctggtcatccacttcaaacatcctgggaaggattccacttactttcttttgcatttttatcaagaagagtttgggaccttaaagagagcttgaactttttaattattctctggaactttcaactttacattttaatgagctctagtcagatcagaattaggtaagggaggttgtcagttgccaaatcctttcctagctgcacagtcctctctttcaggccatatttgttaaaagctgtctgggaggtcattaagatacagataatctctttctaaaccaaaaacagatttctaacttttcagagtcacttgtgtccttacgtaaactgtgtccataagactgtcatttctaattgtgtttatttttctcatattatgaagcaagacatatttcatcagctgttttcttcttaccagtagggtttccatcttcagaatgagaagtgatgcaaccctacaggacacttaagcccgtgaatgcaccccagctcccttttaccaacaaatgaaatgcattgctttccactcactacagaatgggaatgaatgttattaatagttgatgttgagttttgaattttaatgaagtttctcaaggttggactgaaaattaatctttctggtatttctgatgttgacaacaaatgctgccatatgtcgtaaaccacaactggattagataaatggacaaaatactatttactaggaataggaagacatcaattatttccaataaatgctaggacacatgcaaattgtatttttatttttaaatttcctaatttaaaaattatttaaataaaaatatacctgattataagcacatgaagaaaaggaaaaagcacagcaaatgcctcttgtgaaaaaaattaactaggggacaaagaataggatctaattccaggaggcaagtaggtgagttccaaaaagtttgatacatcaagatacatcatggattctctgattttggtttgtttgatttttttctttcattttttggtttttggtttgtcttttgagataagatctcacatagtcctaaactgtcttcaaactcatgaaaactgaggctggccctgaactcattttccttcttccagcctctgcctccaagtactgggataactgccatgctttaccacagggggcccataacacacaattctttaggaaaagacgatctgaagcaaacaaggcaaaatgctaagatttatacatggcaaatacatggatattcattctattacctttattcttttctatatgattggaataaaattacagctttctaataataatactctgtacaatgcttgtaattttgggaaagaatagaatcagacatgtaaagtggtttccacctcaatgaattctcaggactttggtcaaaggcctggaaagccttcattgatagcagcatgcttttgctgaaggctgactgaatgtggaaacagaaacccagtcataaactaattctatgttctttacaactaaaagcagaaatttacagatgtacttgtgactcttcacatcatgggcctacaaaactagcttattgtgttttttctcttaaaagtatacattgttttcataagttgatgcatatgtagtttatgaaaataagcatataggaataaaagccaaaacacactgaaaacaccaccctccagactcagaggcagtggtacacatcttttcatttatacagtggaatgggaagataagtggactttataacagaaaaaaataataaagagcacaaaacataaccactttaaaaaacaaagagtcttttctcatacaatacacctccactcctcccagctcccctctactctgaatccactcccctccatctcctttcagaaaaaaaaaacaaccaaacacaacaaaaaaacaagcagtaagacaaggcagaagccttcatatcgagggtggacaaggcaacccaacaagaattccaagaacaggcaaaagagtcaaggcacaccctctcccacatgtaggagtcccacaaaagcaccacagaggacctagctcagaccacgtgcttgcttcttcagtctctgtgagcctgtgtgagccctgcttaattgattcaattgactgtgttctcctagtgtcctccatcccctctgactcctatgatctttcttgcccttcttctgagggattacctgagctctgagaggagagacccaatgcagaccaccaaattagactccctctccacataatttctggctgtgggtctctgcatcggctcccatctgctgctggaggaagcttatctgatgactactagacaaggagagatgagcatagaagagtatcattaggaatcatttcattgactttttagactcgttgtatttgcgtccaccctaggtctctgagctatccagtttctggttcctggccatctgagcagtattaggcatgggttcccttttatggagtcaacctcaagttaaataagacattgattggtcactcccacaagttctgcaccatcattgcggcagcatatcttgcagtcaagacagattgtaggcccaaggttttgtggctgggttggtgtccatgtttctctttcagtcacctgcagagtaccttcctgcaccaaagagactagcatataaggtttaaggctctatgcaggattcagctcaacttctctgtgttcaatgagctgtgaagatgttgttctcattttgagtagagcagccctctgtcgtagcatcctcctgagttgtttgagaatctcccagagaccctcttggccaacaactcaaccaaatgcaacccaatcccaccactgtcagccttgtctggatatattagatggccagttgaggctccttatcctccattacaaggtgtcctcaataagataactctcatagatttcaggaaattttcactgctttaggtttccacacctcctcccagatgctccctaattccagacttctctccctgcattctctctctccatcccatctcccatacccatctgaccccacacacacatcccatgcaaaatctgttctattttcccttcccaggaaaatctatgtgctcccactggaaactgccttttttacctaacctctctggttctatcatttacttaacagctaatatccacttttaagtaagtacatagtatatttgtctttcagggtctaggttacctcacttgggatgctttttttctaattccatctatttgcctgctaatttcattgtgtcatttttttaagcactggagtaatactccattatgtaaatgtactgaatttctttatccattcttcagttgaggaacatctaggttgtttccagtttctggccattaagaataaagtcatgatgaccatagtttagcaagtgtccttatggtatgagtgtgcatcctttgggtatatgcccaagagtggaatagctgggtcttgaagtagattgattctcagttttctgaggaaccaccatatggatttccaaagtggctgtacaagtttgcactcccaccagcagtggaagaatgttccccttactccacatcctctctagcatgacctgtcactgtgtttttgatcttagaatttgtgatagatataagatagagtctcaaactagtttcgatttgaattttcctgatggctagtgatgctgaacatttttaaaatatttctcaaccatgttagggcctgaagatcgattatgatatttttggcttaaacctcagctcgattccaggagcttgaatctcacactgtcttttagacgcctgctcattacctctggatgactggccttggtagggactggttcctagtttgtataaccatagacctaggccctaagtgggcccacacctattctgtggactagtgaaacatgcctggtgccagaaggctgaggaccttgtggagtgtctgaaggtttgtatatgtgcctagggactggtgagaggctggtgaggatgtacaatttagggattaaaagaaatatttgatatcagctttacacatgataatagatgtcttctgctatcaccccactgttggaaagctatttaagaggatgcttgaataaaccatggactctgcatggactgagagccctcctgaaatgacaagacatcccagtccacacttgatggacctgaagctgtttggctggttccaattgcagccccaacaacatcagtccagaatagatagcctctgtagcatgggactaatacaggctggaccctagcacaaccatttgatattcctctgttgagaattctgtttagatatgtaccccaatttttaattggcttatttgtttttatatatagtttattgagttctttatatattttgtatatcagtcctctaccagatgtgaaattggaaaaagaaagaaagaaagaaagaaagaaagaaagaaagaaagaaagaaagaaagaaagaaagaaagaaagaaagaaagaaagaaagaaagaaagaaagaaagaattcctattctgtgggctgctgcttatatatactatcactttcatatactatcacctatataagaatcacatatatactatttataatctgcaaataatgatacttcaacttcttcctttccagtttgtatcccattgatctccttcagttgtcttaatactctacctaaaacttcaagtactatagtgaatagagatggagagagtaaacaagttctcttgttcctgattttagtaaaattgctttgagttttctccatttaagtttgatgttggctaaagacttggtgtagttgcttttattacgtttaggtatatcccttgcatccctaaactctccacgacttttatcatgaaggggtgttagattttgtcaaaggcttttttccacatctaatgaaataaccatgtgggttttttcttttattttgtttatatggtaaattacatttactgagttttgtatagtgagccatccctgaatctctgagatgaagcctacttgatcagagtgggtaatcttcttgatgtattcttggattcagttttcaagtgttttattgagtacttttgcatttagtttaataatggaaattgctctgcaattctctttttttgttgttgagtctttatgtggtttgggtatcctgatactgtggcttcataaaatgaattggataatattccttatttttctattttgttgaggaatattgtaaacctggtagaattcttcactaaaaccatctggttctacatttttttcgtttgggagaattttaatgaccgcttctatttcactagaagctatctaagtcagtttaaattgtttatctggtcttgatttaactttgataagtgatacctgtcaaaaagttacacatttctcttagattttccaatctggtggaggacagatttttaatgtatatacttatgattctctgaacttcatccatgtctgttgtttatgtcatctttttgtttctgatttttgctaatttggatactctctgtgtcatttagtttggaaatagtttttcttctcttgttcatattcttgaagaactaactctttgattcactggttctttgtattgttctctttgtttctatttttattgatttcagccctcaatttgattatttctcaccatctactcattttgagtgtgtttacttcttttggttctagaaatttcagttgtactgttaagttgctaatatgagatctctccagttttgttttttgtttgtttgcttgtttgtaggcacttagtgctatgaactgtcctcttagcactgcttttattgtgcaataagtttgggtatgatgtgtattcattttcattgaattctatgaagtctttaacatccttctttatttctgccttgacctgttgttcattcactagagagttgttcaattttcatgagtttgcaagctttctattgtttctgttgctgttgatatccagctttaatctgtggtgatcagatagcattcaaggagttatttcagttgttatgtaactgttgagacttgctttgtgaccaagaatatggtcagttttggagaaggttctatgagtgctaaaagaaggtatattattttactttgggtgaaatgttctttaaatatctgctaggtccattgatttataatgtttattagcttcaatattctctgtttagtttttgccaggatgatctgtccattggtaagagttgggtatctatcaaagtcttccactatttgtgtgtactggtcaggatgtgattcatatcttaatatttcttgcacaaaagtgggtgcccctgtgtttggatcatagatgttaagaattgaaatgtcacaatggttggtttttcatttgatgagtatatggagtgtcttaccccatatcttttgattagttttggtttgaagtttattttgttagatattaaaatgactacaccagcttgcttcttaaagaagtcaatttgcttggaaaatctttttctaactctttactctgagataatgtctgtctttgattttgaggtgtattaataagtttcacttagcaaaacacacccaaaaggaaatctaagtacaaagaaaccattaggtcaagaccttaccagttcttacagtatcagtattatatattaattcttaaaactaactcttaaaagcttaaacttaacctatgagattttaagtgaaaatgacaactagaatgagcgtgagaaatgcttctttttgaatcaggatctagcatttttgagttctccagaaagtacatgtccccattgtgttcactatagtgtgcttaaagatccacttaacatacttaaactacttaactcaggcaacagcactctcaagaacactaccaagaatgctaattgagaaaagcagaagatagctttagtggttcacagctacatgctagaagaaaagtttgtatgggaaacacttaagaggtaattttgaaatccaaattcacaaactcatggtgcaaagtgggtcccctagtgtcctctagagttataaactgctcttggctgtttattggctgtctgtgattttttaattgaaataactcagatattcctacaatactagtcatgtccagccctgttgttctgaccactgtagccagcctgttacagacactgtctggttctccaagccactggccaatgctgagtttgccatccataaagaagcagtggcatctatgtagacggtcaaggccaacatgcaacacaactacatagaacctttcctgaattcaacaacagaggctagcaacagggcttacagcagctgtgatatgggacatgagagtgtcagtggcctggtatgaatgcttttctatttcagaaacttgtgtgctcatgcacatgtatgtaggctcaggacatttttaacattaaaacttttactataaatgttgtctttgaattaacatttatcagttgaacatctaggcccatttacctctggcagtttgaagcctaaacttgtaacctagttcaggtaacggcagtgcatttaatggcagataaagaaaagagggagcgtagcaagcccatgtcacacaatgatggtgacagtgtgctaagagtatttaagaattaaggacctggaaggaagatgatttcctttgcatctctaccgtgatccatttctcctaattgcaatcataacaactctgttctgtaaacaatgttgctttcaatgagtgtccttggtagcagggatttgtgcctaaagctgattgtagagtgagagtgtaccacagtggttgaatagataataggaggctcaggctgcaatcctggggactcaacaaataaataatcaagtagacaggtagaatggagtccaaagtgatgacagatgaaaattagagccatcctaagaggaaaaaaaatcctaacaaaaatgagggaagattgcatataaaattagaagtgctgtccttttgccactgagtaatgaacaaaccatcacaggagaatgaatagaataggcaaaaaaaaaaaaaaaagcctggagacatttgaccatgcaactaggggtcaaatcaaggacttaaaatcatcatcccatcaaactagcaccaagtaaagcaacgaaatcaaagagactgtcaacgtttctttgggtgttgttgctcatgcctcagtaaattctggaaataggatgggacttagtaattgctctctttgctttcttgcttcttgttgtctaaatttaatttatgattaaagaattaattagaacagatagagttaacgcattatttcagtactgatatcacaggccatgccgcctgcatgccttgtcacatatggcccctgtccagagccatgcctagcagagtacctgccacatggtttcagaacagaacagacaccctttcccattccacactggtgctaccagaatcaaaattgatttttgaattgtagcatttgatctctactttcagctagatgcactcttaaacaacatgcatttgattgtcacagttcatgtaaatcaggcgtttgacagaggtttgggtgtgtctggctcagtgatcttgagattataatcaaacggcacacactgaagctgcaaactccccaagctcatgggcctgcaaaagctgcttgaaaaatgccactcacactgtggctggcaagagctctcagaaccatgttgtccttaatgtcttgcttctcctcatgactgcatgatttttaagcacaaaatggccagcatctgcctttgtcctacagacagtggtgaagacagagagagcaaggtggaaggcaaagtggctactgttcaggtctcaggagtcacacctcattacttctgcatttttttaaatctgttagaacaagatccataattaactttattccaaacagaagaagcagggtccacattattttggagaacagcaaaaagtggttcagtagcgcctttcagttagcagcgtatagagaatagggagccttggaacccttcctgcatagttcttaattatgttttctttacacctgctttaagatgtcatcaagcataaaattttaaaaccaatataaaaatggatggtaactgtcagaattgtgtacatagcaaagttgatgctacaaattggtagaaaaatgattattttttgtctttagaaagaatcatcttatatatcaatccccctgtttccttcccctccatcctcctataccccatatcacctcccccaacccacctcccacccacttcccaaggactgtgaggccgtccatgggggatcattaaagtccatcacatcgtttgggggaggacctaggcactccttcgtgtatctgggctgagagagtatccctccatagggaatgggctcccaaagtccttttgtgcattagggataaatatttgttccatggttagaggtcccatagactgcccagacctcctaactggcacccacattcagagggtttggcttagtccaatgctggttccccagctttacaacttctgtgcatgtactctcactagatcaggtcaactggttctgtaggtttcctcagcatggtcttgactcttttgctattccctactccctctctaaaactggattccaggaatgtggctcagtgcttagctgtgggtctctgcttctgccaccaacagctactggatgaaggctctaggatggcaattaaggttgtcatcaatctcattataggggaatgtcatcaaaggtggcctctccattactgcctagattctaagttggggtcatctttgtggatctctgaacatttccctagtgtcagatttctctttaaacctatattggctccctctattaaggtatctcttttcttgctctcctctattcctctgctgtctcagtcttcttgatctctcttgttctcctccccgctcctcttctccccttctctttttcctaccttcccccctccctctgtgctcccaatttgctcaggagatcttgaccctttccccttctctggcggaccatgtatttctctcttagggtcctccttgtttcctagtttctctggtggtgtggattataggctggtagtcctttgctctatgtctaatattcatatatgtgattacataccatgcttgtctttccatgactgggttgcctcattcaggatctcaggatggtttcttctagttccatccatttgccttcgaatttcaagatttcattgggtttttttgttttgttttgttttgttttttccactgagtaacaaatactccattgtgtaaatgtaccagattttctccattcattcttcagttgaggggcatctaggttgcttccaggttctggctattacaaacaatgctgctatgaacatagttgaacatgtgttttagttgtatgaatgtgcattctttggatatacacccaagagtgaattgctgtatcaatgaggtagactaattcccattttcctgagaaaccaacatactgatttccaaagtggctgcacaagtttgcactctcaccagcaacagaggattgttctcctttctccacatcttcatagaccttgaaagaataatacgcaactttatatggataaacaaaaaacccaggatagccaaaacaatcctgtacaataaaggaacttacagaagcatcaccatccctgacttcaagctcttctatagagctataataatgaaaacagcttggtattggcacaaaaacagacaggtagatcaatggaatcgactgaagaccctgatattaacccacccaccaatgaacacctgatttttgtcaaagaagttaaaactatacaatggaaaaaagaaagcatcttcaacaaatggtgctggcataactggatgcagacatggagaagattgcagatagatccatatctatcaccatgcacaaaacttaagtccaaatggatcaaagacctcaacataaatccagccacaccgagcctcttagaagagaaagtgggaggtacccttgaatgaattggcacaggagaccacttcctgaacataactccactagcacagacactgagataaacaattaataaatgggactgcctgaaactgagaaacttctgtgaggcaaaggacatagtcaaaaaatgattattttaaatattttataatatgttggaaacattacatatgtagtttgtccatacatttgttttgatttttgatacttatttagagtggtactccacagtgaaaatatgagaacagtcaccatttttctcaaagaagtttggcgtggcttatattttctctataacaagcagaaggaatatatatgcttccctatcttattgtgcttttcacagcagcatcaactgacctacatttggctttctgggtaatgacctgtgttccagagattacaaattcactacactggaagatgggatagaataaggcaaaaatctaaaagaggcattttacagttctttaagagggctagaagcacctggacataaagaaaggaaagaggaaaaatctcaagcaagtgccaagaaatggacactcagagaaaatccttaagaagataacactaactacccaaggcaggtatccaaaattgaaaacaatgaaaagggagatctctattggtgatgtaacaaagagaaattttacatttgggtttcagtttaacaacatgagaaaagacaataaaattttgaacagcccagcgatgtgagagtagaatccattacttctctagttgttcttggaaggtctgtagaagtctgaaatttagagaactaagataatgaaagccttgttggaaagtgtagattggagttgtatatggatgaatgctcaaaactggcttcaaatgaattttatttttagaatttagcaattgtgtatttctgaaatcagaagggaggttactaaaaagttactgcccacgaaaataacaggggactgtaagtcctgaatataaatggggtttggaaaatattctcattctatgggtctagaaaaaaacaattttaaggataaattgttataaggaaactcattgtttctagagttaaccctcatcaacatcgcctaaagatgctaaagactccactggtatccaaagagtactaattaactggttgaactgtttaaatatatgcaaaataagtgcattttataatcctgatacaccaatgagggaagacaagaaatgtagtgatttgtttgtaacagttttgaacacatctggaaaactaaggaatgtgatgatcttgcttgctacattcaacgttctctttgaataaagtaacgaaagaaaagaatgagttcagagatgcattgttcccagtttcatagcataaacacccaaaagccttctatataaaccctaagagagcctctagactgcaggcaaaggactaaggttacagaacacccccccacaaaaaaaggaaacagaccttacaatgaaagtgtgagtaccaaccatgaaggctgtctgcactgaaaacataggcactgtttggaaaagagtgagctcctgtagcttgggatagaaacatgtgagaggactgcttctgacaattttattttgcctgggagaatggtcactctacccttagtgacagatacatcctcaccctaactcatcccctcttcacccttctgtgagggaattactactgccttttctatggaatggctttccctgaaggagtagccaagtaaaacaagactgatgcccctgcaaacccaccctcactgcccatctttttctctagacctatgatagactcaagtctctaagtgaagtacacagagtaacctataagaagatacactgcgcatttgaggaactgattcttctaattcttcaagaatgtatgtgtatgtatggcaataagatttcaagagtgtaggattataatcaatctgcctagaagaaatgagtatactctaaagatactttttttgtcttctctttagctatctgactattgaaacaatggaccccaaggaattacagttttcccaagaatatcttactgttgaagaaaagtctgaagcccagtggtcagccagagaaacttgcatccagaagaggaacttgtctccttgaggaagatttgtaacctgttagatgaacttgcaggagagacttagacctgacccagttagtgagtaggggaacacacatgactagaccacttagtcgtacatatcacttagcttgtatccaaactttcccttcacatcaggacccccaaagatggacttggagggatgtcattagatatcttggccatttttccaatatggatacactgaataaatctaccctttctactttttattactttaatttacttcttttaattggctactgaaatatgtggctgaacctggtttgttgggggaacaggctatgaccccaagtctagtattagataatggaagaaggattatgaaattaaatcaggtaaaatttattgatataggtctatcgagcagggattctgagtttaatgttccagctcacatatctggtaaagttactgatagcttgtttagttggttggttgaagaacgggtgaaagatactgggaatgatatgaagatgcttgttgaagaagggaccatcaaagttttcaggaaatttgaatactggaatggatttgccaagtaaaacctacctcttcacagaggaatgatccagaatgcctttcactaatacagatttttttcctttcagaattacatttaatttttgtattttatgtggggcggggtacatgcccatcatatcctgagtgtggaggtcagaaaacaactgcaggagtcagttttctcctaccatgtgatcctgtggatcaggtcgtcatcagcttagtggtaagtgtcatgataagctaagctatctcactgtcccagaatcaatttgtttgcctgtggcgctgaataattcatcatgttgtttccagaagtgaaataaattagaaagccactgtgctggttagatttttgtcattgtgacacaactaaggagatgtgtgcaaagggtactttaattgagaagtccccatcacattggtttgtaggcaagcttgttgtgcattttcttgacgattgatgtgtgaaggcccagcccacagtgggtggtactatccctggacaggtggtcctgggtatataaaaaagtaggctgagcaaaccaataatcagcatcgctccatgggatctgcttcagataatgactccaggttccatacgtgagttccgaccttagcttccctccatgataaactataatttgtaagttgaaacaaactgtcctctccaagatggttttgctcatggccataggaagaaaatgtagtatcttagtttgggtttctattgctgtgaagagacaccatgaccatggaaagtcttataaaggaaacatttaaatggggccagcttatagtttcagaggtttagtccattaacatcatgatgcaacaggcagacatgacgctggagaaggagctgagggttctacatcttgaaccacaggcagcaggagcaatttgtacttggtgtagcttaagcatgtatgagacctcaaagactgctccccagtgtcatactttatccaacagagccacaactcctaatagtgccactccctatgggccaatcatttaaacatatgagtctacctatttaaaccaccaaactgggtacccaataaattcctctcatctgtgta
